United States Patent Application Publication US 2026/0265353 A1, published September 10, 2026 (application 19/120,378).

The application's sequence listing, which the Patent Office published only in electronic form, follows.

SEQUENCE LISTING (2388 sequences)

SEQ ID NO: 1 - protein, 439 aa, Homo sapiens
  source 1..439: note = Human MYC
MPLNVSFTNRNYDLDYDSVQPYFYCDEEENFYQQQQQSELQPPAPSEDIWKKFELLPTPPLSPSRRSGLCSPSYVAVTPFSLRGDNDGGGGSFSTADQLEMVTELLGGDMVNQSFICDPDDETFIKNIIIQDCMWSGFSAAAKLVSEKLASYQAARKDSGSPNPARGHSVCSTSSLYLQDLSAAASECIDPSVVFPYPLNDSSSPKSCASQDSSAFSPSSDSLLSSTESSPQGSPEPLVLHEETPPTTSSDSEEEQEDEEEIDVVSVEKRQAPGKRSESGSPSAGGHSKPPHSPLVLKRCHVSTHQHNYAAPPSTRKDYPAAKRVKLDSVRVLRQISNNRKCTSPRSSDTEENVKRRTHNVLERQRRNELKRSFFALRDQIPELENNEKAPKVVILKKATAYILSVQAEEQKLISEEDLLRKRREQLKHKLEQLRNSCA

SEQ ID NO: 2 - protein, 3142 aa, Homo sapiens
  source 1..3142: note = Human HTT
MATLEKLMKAFESLKSFQQQQQQQQQQQQQQQQQQQQQPPPPPPPPPPPQLPQPPPQAQPLLPQPQPPPPPPPPPPGPAVAEEPLHRPKKELSATKKDRVNHCLTICENIVAQSVRNSPEFQKLLGIAMELFLLCSDDAESDVRMVADECLNKVIKALMDSNLPRLQLELYKEIKKNGAPRSLRAALWRFAELAHLVRPQKCRPYLVNLLPCLTRTSKRPEESVQETLAAAVPKIMASFGNFANDNEIKVLLKAFIANLKSSSPTIRRTAAGSAVSICQHSRRTQYFYSWLLNVLLGLLVPVEDEHSTLLILGVLLTLRYLVPLLQQQVKDTSLKGSFGVTRKEMEVSPSAEQLVQVYELTLHHTQHQDHNVVTGALELLQQLFRTPPPELLQTLTAVGGIGQLTAAKEESGGRSRSGSIVELIAGGGSSCSPVLSRKQKGKVLLGEEEALEDDSESRSDVSSSALTASVKDEISGELAASSGVSTPGSAGHDIITEQPRSQHTLQADSVDLASCDLTSSATDGDEEDILSHSSSQVSAVPSDPAMDLNDGTQASSPISDSSQTTTEGPDSAVTPSDSSEIVLDGTDNQYLGLQIGQPQDEDEEATGILPDEASEAFRNSSMALQQAHLLKNMSHCRQPSDSSVDKFVLRDEATEPGDQENKPCRIKGDIGQSTDDDSAPLVHCVRLLSASFLLTGGKNVLVPDRDVRVSVKALALSCVGAAVALHPESFFSKLYKVPLDTTEYPEEQYVSDILNYIDHGDPQVRGATAILCGTLICSILSRSRFHVGDWMGTIRTLTGNTFSLADCIPLLRKTLKDESSVTCKLACTAVRNCVMSLCSSSYSELGLQLIIDVLTLRNSSYWLVRTELLETLAEIDFRLVSFLEAKAENLHRGAHHYTGLLKLQERVLNNVVIHLLGDEDPRVRHVAAASLIRLVPKLFYKCDQGQADPVVAVARDQSSVYLKLLMHETQPPSHFSVSTITRIYRGYNLLPSITDVTMENNLSRVIAAVSHELITSTTRALTFGCCEALCLLSTAFPVCIWSLGWHCGVPPLSASDESRKSCTVGMATMILTLLSSAWFPLDLSAHQDALILAGNLLAASAPKSLRSSWASEEEANPAATKQEEVWPALGDRALVPMVEQLFSHLLKVINICAHVLDDVAPGPAIKAALPSLTNPPSLSPIRRKGKEKEPGEQASVPLSPKKGSEASAASRQSDTSGPVTTSKSSSLGSFYHLPSYLKLHDVLKATHANYKVTLDLQNSTEKFGGFLRSALDVLSQILELATLQDIGKCVEEILGYLKSCFSREPMMATVCVQQLLKTLFGTNLASQFDGLSSNPSKSQGRAQRLGSSSVRPGLYHYCFMAPYTHFTQALADASLRNMVQAEQENDTSGWFDVLQKVSTQLKTNLTSVTKNRADKNAIHNHIRLFEPLVIKALKQYTTTTCVQLQKQVLDLLAQLVQLRVNYCLLDSDQVFIGFVLKQFEYIEVGQFRESEAIIPNIFFFLVLLSYERYHSKQIIGIPKIIQLCDGIMASGRKAVTHAIPALQPIVHDLFVLRGTNKADAGKELETQKEVVVSMLLRLIQYHQVLEMFILVLQQCHKENEDKWKRLSRQIADIILPMLAKQQMHIDSHEALGVLNTLFEILAPSSLRPVDMLLRSMFVTPNTMASVSTVQLWISGILAILRVLISQSTEDIVLSRIQELSFSPYLISCTVINRLRDGDSTSTLEEHSEGKQIKNLPEETFSRFLLQLVGILLEDIVTKQLKVEMSEQQHTFYCQELGTLLMCLIHIFKSGMFRRITAAATRLFRSDGCGGSFYTLDSLNLRARSMITTHPALVLLWCQILLLVNHTDYRWWAEVQQTPKRHSLSSTKLLSPQMSGEEEDSDLAAKLGMCNREIVRRGALILFCDYVCQNLHDSEHLTWLIVNHIQDLISLSHEPPVQDFISAVHRNSAASGLFIQAIQSRCENLSTPTMLKKTLQCLEGIHLSQSGAVLTLYVDRLLCTPFRVLARMVDILACRRVEMLLAANLQSSMAQLPMEELNRIQEYLQSSGLAQRHQRLYSLLDRFRLSTMQDSLSPSPPVSSHPLDGDGHVSLETVSPDKDWYVHLVKSQCWTRSDSALLEGAELVNRIPAEDMNAFMMNSEFNLSLLAPCLSLGMSEISGGQKSALFEAAREVTLARVSGTVQQLPAVHHVFQPELPAEPAAYWSKLNDLFGDAALYQSLPTLARALAQYLVVVSKLPSHLHLPPEKEKDIVKFVVATLEALSWHLIHEQIPLSLDLQAGLDCCCLALQLPGLWSVVSSTEFVTHACSLIYCVHFILEAVAVQPGEQLLSPERRTNTPKAISEEEEEVDPNTQNPKYITAACEMVAEMVESLQSVLALGHKRNSGVPAFLTPLLRNIIISLARLPLVNSYTRVPPLVWKLGWSPKPGGDFGTAFPEIPVEFLQEKEVFKEFIYRINTLGWTSRTQFEETWATLLGVLVTQPLVMEQEESPPEEDTERTQINVLAVQAITSLVLSAMTVPVAGNPAVSCLEQQPRNKPLKALDTRFGRKLSIIRGIVEQEIQAMVSKRENIATHHLYQAWDPVPSLSPATTGALISHEKLLLQINPERELGSMSYKLGQVSIHSVWLGNSITPLREEEWDEEEEEEADAPAPSSPPTSPVNSRKHRAGVDIHSCSQFLLELYSRWILPSSSARRTPAILISEVVRSLLVVSDLFTERNQFELMYVTLTELRRVHPSEDEILAQYLVPATCKAAAVLGMDKAVAEPVSRLLESTLRSSHLPSRVGALHGVLYVLECDLLDDTAKQLIPVISDYLLSNLKGIAHCVNIHSQQHVLVMCATAFYLIENYPLDVGPEFSASIIQMCGVMLSGSEESTPSIIYHCALRGLERLLLSEQLSRLDAESLVKLSVDRVNVHSPHRAMAALGLMLTCMYTGKEKVSPGRTSDPNPAAPDSESVIVAMERVSVLFDRIRKGFPCEARVVARILPQFLDDFFPPQDIMNKVIGEFLSNQQPYPQFMATVVYKVFQTLHSTGQSSMVRDWVMLSLSNFTQRAPVAMATWSLSCFFVSASTSPWVAAILPHVISRMGKLEQVDVNLFCLVATDFYRHQIEEELDRRAFQSVLEVVAAPGSPYHRLLTCLRNVHKVTTC

SEQ ID NO: 3 - protein, 781 aa, Homo sapiens
  source 1..781: note = Human CTNNB1
MATQADLMELDMAMEPDRKAAVSHWQQQSYLDSGIHSGATTTAPSLSGKGNPEEEDVDTSQVLYEWEQGFSQSFTQEQVADIDGQYAMTRAQRVRAAMFPETLDEGMQIPSTQFDAAHPTNVQRLAEPSQMLKHAVVNLINYQDDAELATRAIPELTKLLNDEDQVVVNKAAVMVHQLSKKEASRHAIMRSPQMVSAIVRTMQNTNDVETARCTAGTLHNLSHHREGLLAIFKSGGIPALVKMLGSPVDSVLFYAITTLHNLLLHQEGAKMAVRLAGGLQKMVALLNKTNVKFLAITTDCLQILAYGNQESKLIILASGGPQALVNIMRTYTYEKLLWTTSRVLKVLSVCSSNKPAIVEAGGMQALGLHLTDPSQRLVQNCLWTLRNLSDAATKQEGMEGLLGTLVQLLGSDDINVVTCAAGILSNLTCNNYKNKMMVCQVGGIEALVRTVLRAGDREDITEPAICALRHLTSRHQEAEMAQNAVRLHYGLPVVVKLLHPPSHWPLIKATVGLIRNLALCPANHAPLREQGAIPRLVQLLVRAHQDTQRRTSMGGTQQQFVEGVRMEEIVEGCTGALHILARDVHNRIVIRGLNTIPLFVQLLYSPIENIQRVAAGVLCELAQDKEAAEAIEAEGATAPLTELLHSRNEGVATYAAAVLFRMSEDKPQDYKKRLSVELTSSLFRTEPMAWNETADLGLDIGAQGEPLGYRQDDPSYRSFHSGGYGQDALGMDPMMEHEMGGHHPGADYPVDGLPDLGHAQDLMDGLPPGDSNQLAWFDTDL

SEQ ID NO: 4 - protein, 254 aa, synthetic construct
  source 1..254: note = 3DX.1 peptide
EVKLVESGGDLVKPGGSLKLSCAASGFTFSHYGMSWVRQTPDKRLEWVATIGSRGTYTHYPDSVKGRFTISRDNDKNALYLQMNSLRTEDTAMYYCARKSEFYYYGNTYYYSAMDYWGQGASVTVSSGGGGSGGGDSGGGGSDIVLTQSPASLAVSLGQRATISCRASESVDNYGFSFMNWFQQKPGQPPKLLIYATSNRGSGVPARFSGSGSGTDFSLNIHPVEEDDSAMYFCQQTKEVPWTFGGGTKLEIKR

SEQ ID NO: 5 - protein, 254 aa, synthetic construct
  source 1..254: note = 3DX.2 peptide
DIVLTQSPASLAVSLGQRATISCRASESVDNYGFSFMNWFQQKPGQPPKLLIYATSNRGSGVPARFSGSGSGTDFSLNIHPVEEDDSAMYFCQQTKEVPWTFGGGTKLEIKRGGGGSGGGDSGGGGSEVKLVESGGDLVKPGGSLKLSCAASGFTFSHYGMSWVRQTPDKRLEWVATIGSRGTYTHYPDSVKGRFTISRDNDKNALYLQMNSLRTEDTAMYYCARKSEFYYYGNTYYYSAMDYWGQGASVTVSS

SEQ ID NO: 6 - protein, 92 aa, synthetic construct
  source 1..92: note = OMOMYC peptide
SDTEENVKRRTHNVLERQRRNELKRSFFALRDQIPELENNEKAPKVVILKKATAYILSVQAETQKLISEIDLLRKQNEQLKHKLEQLRNSCA

SEQ ID NO: 7 - protein, 87 aa, synthetic construct
  source 1..87: note = FOXP3DBD 337-423 peptide
RPPFTYATLIRWAILEAPEKQRTLNEIYHWFTRMFAFFRNHPATWKNAIRHNLSLHKCFVRVESEKGAVWTVDELEFRKKRSQRPSR

SEQ ID NO: 8 - protein, 431 aa, Homo sapiens
  source 1..431: note = Human FOXP3
MPNPRPGKPSAPSLALGPSPGASPSWRAAPKASDLLGARGPGGTFQGRDLRGGAHASSSSLNPMPPSQLQLPTLPLVMVAPSGARLGPLPHLQALLQDRPHFMHQLSTVDAHARTPVLQVHPLESPAMISLTPPTTATGVFSLKARPGLPPGINVASLEWVSREPALLCTFPNPSAPRKDSTLSAVPQSSYPLLANGVCKWPGCEKVFEEPEDFLKHCQADHLLDEKGRAQCLLQREMVQSLEQQLVLEKEKLSAMQAHLAGKMALTKASSVASSDKGSCCIVAAGSQGPVVPAWSGPREAPDSLFAVRRHLWGSHGNSTFPEFLHNMDYFKFHNMRPPFTYATLIRWAILEAPEKQRTLNEIYHWFTRMFAFFRNHPATWKNAIRHNLSLHKCFVRVESEKGAVWTVDELEFRKKRSQRPSRCSNPTPGP

SEQ ID NO: 9 - protein, 114 aa, synthetic construct
  source 1..114: note = VL12.3 peptide
GSQPVLTQSPSVSAAPRQRVTISVSGSNSNIGSNTVNWIQQLPGRAPELLMYDDDLLAPGVSDRFSGSRSGTSASLTISGLQSEDEADYYAATWDDSLNGWVFGGGTKVTVLSG

SEQ ID NO: 10 - protein, 251 aa, synthetic construct
  source 1..251: note = INT41 peptide
AEVQLVVSGGGLVKPGGSMILSCAASGFTFSNYSMNWVRQAPGKGLEWVSSISSSSEYIYYADFVKGRFTISRDNAKNSLYLQMDSLRAEDTAVYYCAWPGYRKAWGRGTLVTVSSGGGGSGGGGSGGGGSQSVLTQPASVSGSPGQSITISCAGTSSDVGGYNYVSWYQQHPGKAPKLMIYEDSKRPSGVSNRFSGSKSGNTASLTISGLRAEDEADYYCSYCASKGHWLFGGGTKLAVLGAAAEQKLIS

SEQ ID NO: 11 - protein, 45 aa, synthetic construct
  source 1..45: note = TCF4 10-54 peptide
DDLGANDELISFKDEGEQEEKSSENSSAERDLADVKSSLVNESET

SEQ ID NO: 12 - protein, 619 aa, Homo sapiens
  source 1..619: note = TCF4 peptide
MPQLNGGGGDDLGANDELISFKDEGEQEEKSSENSSAERDLADVKSSLVNESETNQNSSSDSEAERRPPPRSESFRDKSRESLEEAAKRQDGGLFKGPPYPGYPFIMIPDLTSPYLPNGSLSPTARTLHFQSGSTHYSAYKTIEHQIAVQYLQMKWPLLDVQAGSLQSRQALKDARSPSPAHIVSNKVPVVQHPHHVHPLTPLITYSNEHFTPGNPPPHLPADVDPKTGIPRPPHPPDISPYYPLSPGTVGQIPHPLGWLVPQQGQPVYPITTGGFRHPYPTALTVNASMSRFPPHMVPPHHTLHTTGIPHPAIVTPTVKQESSQSDVGSLHSSKHQDSKKEEEKKKPHIKKPLNAFMLYMKEMRAKVVAECTLKESAAINQILGRRWHALSREEQAKYYELARKERQLHMQLYPGWSARDNYGKKKKRKRDKQPGETNEHSECFLNPCLSLPPITDLSAPKKCRARFGLDQQNNWCGPCRRKKKCVRYIQGEGSCLSPPSSDGSLLDSPPPSPNLLGSPPRDAKSQTEQTQPLSLSLKPDPLAHLSMMPPPPALLLAEATHKASALCPNGALDLPPAALQPAAPSSSIAQPSTSSLHSHSSLAGTQPQPLSLVTKSLE

SEQ ID NO: 13 - protein, 122 aa, synthetic construct
  source 1..122: note = BC2 peptide
QVQLVESGGGLVQPGGSLTLSCTASGFTLDHYDIGWFRQAPGKEREGVSCINNSDDDTYYADSVKGRFTIFMNNAKDTVYLQMNSLKPEDTAIYYCAEARGCKRGRYEYDFWGQGTQVTVSS

SEQ ID NO: 14 - protein, 303 aa, Homo sapiens
  source 1..303: note = CHIP full length peptide
MKGKEEKEGGARLGAGGGSPEKSPSAQELKEQGNRLFVGRKYPEAAACYGRAITRNPLVAVYYTNRALCYLKMQQHEQALADCRRALELDGQSVKAHFFLGQCQLEMESYDEAIANLQRAYSLAKEQRLNFGDDIPSALRIAKKKRWNSIEERRIHQESELHSYLSRLIAAERERELEECQRNHEGDEDDSHVRAQQACIEAKHDKYMADMDELFSQVDEKRKKRDIPDYLCGKISFELMREPCITPSGITYDRKDIEEHLQRVGHFDPVTRSPLTQEQLIPNLAMKEVIDAFISENGWVEDY

SEQ ID NO: 15 - protein, 228 aa, Homo sapiens
  source 1..228: note = RNF114 full length peptide
MAAQQRDCGGAAQLAGPAAEADPLGRFTCPVCLEVYEKPVQVPCGHVFCSACLQECLKPKKPVCGVCRSALAPGVRAVELERQIESTETSCHGCRKNFFLSKIRSHVATCSKYQNYIMEGVKATIKDASLQPRNVPNRYTFPCPYCPEKNFDQEGLVEHCKLFHSTDTKSVVCPICASMPWGDPNYRSANFREHIQRRHRFSYDTFVDYDVDEEDMMNQVLQRSIIDQ

SEQ ID NO: 16 - protein, 232 aa, Homo sapiens
  source 1..232: note = RNF125 full length peptide
MGSVLSTDSGKSAPASATARALERRRDPELPVTSFDCAVCLEVLHQPVRTRCGHVFCRSCIATSLKNNKWTCPYCRAYLPSEGVPATDVAKRMKSEYKNCAECDTLVCLSEMRAHIRTCQKYIDKYGPLQELEETAARCVCPFCQRELYEDSLLDHCITHHRSERRPVFCPLCRLIPDENPSSFSGSLIRHLQVSHTLFYDDFIDFNIIEEALIRRVLDRSLLEYVNHSNTT

SEQ ID NO: 17 - protein, 245 aa, Homo sapiens
  source 1..245: note = RNF138 full length peptide
MAEDLSAATSYTEDDFYCPVCQEVLKTPVRTTACQHVFCRKCFLTAMRESGAHCPLCRGNVTRRERACPERALDLENIMRKFSGSCRCCAKQIKFYRMRHHYKSCKKYQDEYGVSSIIPNFQISQDSVGNSNRSETSTSDNTETYQENTSSSGHPTFKCPLCQESNFTRQRLLDHCNSNHLFQIVPVTCPICVSLPWGDPSQITRNFVSHLNQRHQFDYGEFVNLQLDEETQYQTAVEESFQVNI

SEQ ID NO: 18 - protein, 237 aa, Homo sapiens
  source 1..237: note = RNF166 full length peptide
MAMFRSLVASAQQRQPPAGPAGGDSGLEAQYTCPICLEVYHRPVAIGSCGHTFCGECLQPCLQVPSPLCPLCRLPFDPKKVDKATHVEKQLSSYKAPCRGCNKKVTLAKMRVHISSCLKVQEQMANCPKFVPVVPTSQPIPSNIPNRSTFACPYCGARNLDQQELVKHCVESHRSDPNRVVCPICSAMPWGDPSYKSANFLQHLLHRHKFSYDTFVDYSIDEEAAFQAALALSLSEN

SEQ ID NO: 19 - protein, 395 aa, Homo sapiens
  source 1..395: note = NHLRC1 full length peptide
MAAEASESGPALHELMREAEISLLECKVCFEKFGHRQQRRPRNLSCGHVVCLACVAALAHPRTLALECPFCRRACRGCDTSDCLPVLHLIELLGSALRQSPAAHRAAPSAPGALTCHHTFGGWGTLVNPTGLALCPKTGRVVVVHDGRRRVKIFDSGGGCAHQFGEKGDAAQDIRYPVDVTITNDCHVVVTDAGDRSIKVFDFFGQIKLVIGGQFSLPWGVETTPQNGIVVTDAEAGSLHLLDVDFAEGVLRRTERLQAHLCNPRGVAVSWLTGAIAVLEHPLALGTGVCSTRVKVFSSSMQLVGQVDTFGLSLYFPSKITASAVTFDHQGNVIVADTSGPAILCLGKPEEFPVPKPMVTHGLSHPVALTFTKENSLLVLDTASHSIKVYKVDWG

SEQ ID NO: 20 - protein, 982 aa, Homo sapiens
  source 1..982: note = CBL-b (Y363E) full length peptide
MANSMNGRNPGGRGGNPRKGRILGIIDAIQDAVGPPKQAAADRRTVEKTWKLMDKVVRLCQNPKLQLKNSPPYILDILPDTYQHLRLILSKYDDNQKLAQLSENEYFKIYIDSLMKKSKRAIRLFKEGKERMYEEQSQDRRNLTKLSLIFSHMLAEIKAIFPNGQFQGDNFRITKADAAEFWRKFFGDKTIVPWKVFRQCLHEVHQISSGLEAMALKSTIDLTCNDYISVFEFDIFTRLFQPWGSILRNWNFLAVTHPGYMAFLTYDEVKARLQKYSTKPGSYIFRLSCTRLGQWAIGYVTGDGNILQTIPHNKPLFQALIDGSREGFYLYPDGRSYNPDLTGLCEPTPHDHIKVTQEQYELECEMGSTFQLCKICAENDKDVKIEPCGHLMCTSCLTAWQESDGQGCPFCRCEIKGTEPIIVDPFDPRDEGSRCCSIIDPFGMPMLDLDDDDDREESLMMNRLANVRKCTDRQNSPVTSPGSSPLAQRRKPQPDPLQIPHLSLPPVPPRLDLIQKGIVRSPCGSPTGSPKSSPCMVRKQDKPLPAPPPPLRDPPPPPPERPPPIPPDNRLSRHIHHVESVPSRDPPMPLEAWCPRDVFGTNQLVGCRLLGEGSPKPGITASSNVNGRHSRVGSDPVLMRKHRRHDLPLEGAKVFSNGHLGSEEYDVPPRLSPPPPVTTLLPSIKCTGPLANSLSEKTRDPVEEDDDEYKIPSSHPVSLNSQPSHCHNVKPPVRSCDNGHCMLNGTHGPSSEKKSNIPDLSIYLKGDVFDSASDPVPLPPARPPTRDNPKHGSSLNRTPSDYDLLIPPLGEDAFDALPPSLPPPPPPARHSLIEHSKPPGSSSRPSSGQDLFLLPSDPFVDLASGQVPLPPARRLPGENVKTNRTSQDYDQLPSCSDGSQAPARPPKPRPRRTAPEIHHRKPHGPEAALENVDAKIAKLMGEGYAFEEVKRALEIAQNNVEVARSILREFAFPPPVSPRLNL

SEQ ID NO: 21 - protein, 475 aa, Homo sapiens [sequence omitted]

SEQ ID NO: 22 - protein, 875 aa, Homo sapiens
  source 1..875: note = E6AP full length peptide
MEKLHQCYWKSGEPQSDDIEASRMKRAAAKHLIERYYHQLTEGCGNEACTNEFCASCPTFLRMDNNAAAIKALELYKINAKLCDPHPSKKGASSAYLENSKGAPNNSCSEIKMNKKGARIDFKDVTYLTEEKVYEILELCREREDYSPLIRVIGRVFSSAEALVQSFRKVKQHTKEELKSLQAKDEDKDEDEKEKAACSAAAMEEDSEASSSRIGDSSQGDNNLQKLGPDDVSVDIDAIRRVYTRLLSNEKIETAFLNALVYLSPNVECDLTYHNVYSRDPNYLNLFIIVMENRNLHSPEYLEMALPLFCKAMSKLPLAAQGKLIRLWSKYNADQIRRMMETFQQLITYKVISNEFNSRNLVNDDDAIVAASKCLKMVYYANVVGGEVDTNHNEEDDEEPIPESSELTLQELLGEERRNKKGPRVDPLETELGVKTLDCRKPLIPFEEFINEPLNEVLEMDKDYTFFKVETENKFSFMTCPFILNAVTKNLGLYYDNRIRMYSERRITVLYSLVQGQQLNPYLRLKVRRDHIIDDALVRLEMIAMENPADLKKQLYVEFEGEQGVDEGGVSKEFFQLVVEEIFNPDIGMFTYDESTKLFWFNPSSFETEGQFTLIGIVLGLAIYNNCILDVHFPMVVYRKLMGKKGTFRDLGDSHPVLYQSLKDLLEYEGNVEDDMMITFQISQTDLFGNPMMYDLKENGDKIPITNENRKEFVNLYSDYILNKSVEKQFKAFRRGFHMVTNESPLKYLFRPEEIELLICGSRNLDFQALEETTEYDGGYTRDSVLIREFWEIVHSFTDEQKRLFLQFTTGTDRAPVGGLGKLKMIIAKNGPDTERLPTSHTCFNVLLLPEYSSKEKLKERLLKAITYAKGFGML

SEQ ID NO: 23 - protein, 707 aa, Homo sapiens
  source 1..707: note = FBXW7 alpha full length peptide
MNQELLSVGSKRRRTGGSLRGNPSSSQVDEEQMNRVVEEEQQQQLRQQEEEHTARNGEVVGVEPRPGGQNDSQQGQLEENNNRFISVDEDSSGNQEEQEEDEEHAGEQDEEDEEEEEMDQESDDFDQSDDSSREDEHTHTNSVTNSSSIVDLPVHQLSSPFYTKTTKMKRKLDHGSEVRSFSLGKKPCKVSEYTSTTGLVPCSATPTTFGDLRAANGQGQQRRRITSVQPPTGLQEWLKMFQSWSGPEKLLALDELIDSCEPTQVKHMMQVIEPQFQRDFISLLPKELALYVLSFLEPKDLLQAAQTCRYWRILAEDNLLWREKCKEEGIDEPLHIKRRKVIKPGFIHSPWKSAYIRQHRIDTNWRRGELKSPKVLKGHDDHVITCLQFCGNRIVSGSDDNTLKVWSAVTGKCLRTLVGHTGGVWSSQMRDNIIISGSTDRTLKVWNAETGECIHTLYGHTSTVRCMHLHEKRVVSGSRDATLRVWDIETGQCLHVLMGHVAAVRCVQYDGRRVVSGAYDFMVKVWDPETETCLHTLQGHTNRVYSLQFDGIHVVSGSLDTSIRVWDVETGNCIHTLTGHQSLTSGMELKDNILVSGNADSTVKIWDIKTGQCLQTLQGPNKHQSAVTCLQFNKNFVITSSDDGTVKLWDLKTGEFIRNLVTLESGGSGGVVWRIRASNTKLVCAVGSRNGTEETKLLVLDFDVDMK

SEQ ID NO: 24 - protein, 627 aa, Homo sapiens
  source 1..627: note = FBXW7 beta full length peptide
MCVPRSGLILSCICLYCGVLLPVLLPNLPFLTCLSMSTLESVTYLPEKGLYCQRLPSSRTHGGTESLKGKNTENMGFYGTLKMIFYKMKRKLDHGSEVRSFSLGKKPCKVSEYTSTTGLVPCSATPTTFGDLRAANGQGQQRRRITSVQPPTGLQEWLKMFQSWSGPEKLLALDELIDSCEPTQVKHMMQVIEPQFQRDFISLLPKELALYVLSFLEPKDLLQAAQTCRYWRILAEDNLLWREKCKEEGIDEPLHIKRRKVIKPGFIHSPWKSAYIRQHRIDTNWRRGELKSPKVLKGHDDHVITCLQFCGNRIVSGSDDNTLKVWSAVTGKCLRTLVGHTGGVWSSQMRDNIIISGSTDRTLKVWNAETGECIHTLYGHTSTVRCMHLHEKRVVSGSRDATLRVWDIETGQCLHVLMGHVAAVRCVQYDGRRVVSGAYDFMVKVWDPETETCLHTLQGHTNRVYSLQFDGIHVVSGSLDTSIRVWDVETGNCIHTLTGHQSLTSGMELKDNILVSGNADSTVKIWDIKTGQCLQTLQGPNKHQSAVTCLQFNKNFVITSSDDGTVKLWDLKTGEFIRNLVTLESGGSGGVVWRIRASNTKLVCAVGSRNGTEETKLLVLDFDVDMK

SEQ ID NO: 25 - protein, 605 aa, Homo sapiens [sequence omitted]

SEQ ID NO: 26 - protein, 624 aa, Homo sapiens
  source 1..624: note = Keap1 full length peptide
MQPDPRPSGAGACCRFLPLQSQCPEGAGDAVMYASTECKAEVTPSQHGNRTFSYTLEDHTKQAFGIMNELRLSQQLCDVTLQVKYQDAPAAQFMAHKVVLASSSPVFKAMFTNGLREQGMEVVSIEGIHPKVMERLIEFAYTASISMGEKCVLHVMNGAVMYQIDSVVRACSDFLVQQLDPSNAIGIANFAEQIGCVELHQRAREYIYMHFGEVAKQEEFFNLSHCQLVTLISRDDLNVRCESEVFHACINWVKYDCEQRRFYVQALLRAVRCHSLTPNFLQMQLQKCEILQSDSRCKDYLVKIFEELTLHKPTQVMPCRAPKVGRLIYTAGGYFRQSLSYLEAYNPSDGTWLRLADLQVPRSGLAGCVVGGLLYAVGGRNNSPDGNTDSSALDCYNPMTNQWSPCAPMSVPRNRIGVGVIDGHIYAVGGSHGCIHHNSVERYEPERDEWHLVAPMLTRRIGVGVAVLNRLLYAVGGFDGTNRLNSAECYYPERNEWRMITAMNTIRSGAGVCVLHNCIYAAGGYDGQDQLNSVERYDVETETWTFVAPMKHRRSALGITVHQGRIYVLGGYDGHTFLDSVECYDPDTDTWSEVTRMTSGRSGVGVAVTMEPCRKQIDQQNCTC

SEQ ID NO: 27 - protein, 374 aa, Homo sapiens
  source 1..374: note = SPOP full length peptide
MSRVPSPPPPAEMSSGPVAESWCYTQIKVVKFSYMWTINNFSFCREEMGEVIKSSTFSSGANDKLKWCLRVNPKGLDEESKDYLSLYLLLVSCPKSEVRAKFKFSILNAKGEETKAMESQRAYRFVQGKDWGFKKFIRRDFLLDEANGLLPDDKLTLFCEVSVVQDSVNISGQNTMNMVKVPECRLADELGGLWENSRFTDCCLCVAGQEFQAHKAILAARSPVFSAMFEHEMEESKKNRVEINDVEPEVFKEMMCFIYTGKAPNLDKMADDLLAAADKYALERLKVMCEDALCSNLSVENAAEILILADLHSADQLKTQAVDFINYHASDVLETSGWKSMVVSHPHLVAEAYRSLASAQCPFLGPPRKRLKQS

SEQ ID NO: 28 - protein, 1507 aa, Homo sapiens
  source 1..1507: note = DCAF1 full length peptide
MTTVVVHVDSKAELTTLLEQWEKEHGSGQDMVPILTRMSQLIEKETEEYRKGDPDPFDDRHPGRADPECMLGHLLRILFKNDDFMNALVNAYVMTSREPPLNTAACRLLLDIMPGLETAVVFQEKEGIVENLFKWAREADQPLRTYSTGLLGGAMENQDIAANYRDENSQLVAIVLRRLRELQLQEVALRQENKRPSPRKLSSEPLLPLDEEAVDMDYGDMAVDVVDGDQEEASGDMEISFHLDSGHKTSSRVNSTTKPEDGGLKKNKSAKQGDRENFRKAKQKLGFSSSDPDRMFVELSNSSWSEMSPWVIGTNYTLYPMTPAIEQRLILQYLTPLGEYQELLPIFMQLGSRELMMFYIDLKQTNDVLLTFEALKHLASLLLHNKFATEFVAHGGVQKLLEIPRPSMAATGVSMCLYYLSYNQDAMERVCMHPHNVLSDVVNYTLWLMECSHASGCCHATMFFSICFSFRAVLELFDRYDGLRRLVNLISTLEILNLEDQGALLSDDEIFASRQTGKHTCMALRKYFEAHLAIKLEQVKQSLQRTEGGILVHPQPPYKACSYTHEQIVEMMEFLIEYGPAQLYWEPAEVFLKLSCVQLLLQLISIACNWKTYYARNDTVRFALDVLAILTVVPKIQLQLAESVDVLDEAGSTVSTVGISIILGVAEGEFFIHDAEIQKSALQIIINCVCGPDNRISSIGKFISGTPRRKLPQNPKSSEHTLAKMWNVVQSNNGIKVLLSLLSIKMPITDADQIRALACKALVGLSRSSTVRQIISKLPLFSSCQIQQLMKEPVLQDKRSDHVKFCKYAAELIERVSGKPLLIGTDVSLARLQKADVVAQSRISFPEKELLLLIRNHLISKGLGETATVLTKEADLPMTAASHSSAFTPVTAAASPVSLPRTPRIANGIATRLGSHAAVGASAPSAPTAHPQPRPPQGPLALPGPSYAGNSPLIGRISFIRERPSPCNGRKIRVLRQKSDHGAYSQSPAIKKQLDRHLPSPPTLDSIITEYLREQHARCKNPVATCPPFSLFTPHQCPEPKQRRQAPINFTSRLNRRASFPKYGGVDGGCFDRHLIFSRFRPISVFREANEDESGFTCCAFSARERFLMLGTCTGQLKLYNVFSGQEEASYNCHNSAITHLEPSRDGSLLLTSATWSQPLSALWGMKSVFDMKHSFTEDHYVEFSKHSQDRVIGTKGDIAHIYDIQTGNKLLTLFNPDLANNYKRNCATFNPTDDLVLNDGVLWDVRSAQAIHKFDKFNMNISGVFHPNGLEVIINTEIWDLRTFHLLHTVPALDQCRVVFNHTGTVMYGAMLQADDEDDLMEERMKSPFGSSFRTFNATDYKPIATIDVKRNIFDLCTDTKDCYLAVIENQGSMDALNMDTVCRLYEVGRQRLAEDEDEEEDQEEEEQEEEDDDEDDDDTDDLDELDTDQLLEAELEEDDNNENAGEDGDNDFSPSDEELANLLEEGEDGEDEDSDADEEVELILGDTDSSDNSDLEDDIILSLNE

SEQ ID NO: 29 - protein, 176 aa, synthetic construct
  source 1..176: note = CHIP URD (128-303) peptide
RLNFGDDIPSALRIAKKKRWNSIEERRIHQESELHSYLSRLIAAERERELEECQRNHEGDEDDSHVRAQQACIEAKHDKYMADMDELFSQVDEKRKKRDIPDYLCGKISFELMREPCITPSGITYDRKDIEEHLQRVGHFDPVTRSPLTQEQLIPNLAMKEVIDAFISENGWVEDY

SEQ ID NO: 30 - protein, 95 aa, synthetic construct
  source 1..95: note = RNF114 URD (25-119) peptide
GRFTCPVCLEVYEKPVQVPCGHVFCSACLQECLKPKKPVCGVCRSALAPGVRAVELERQIESTETSCHGCRKNFFLSKIRSHVATCSKYQNYIME

SEQ ID NO: 31 - protein, 127 aa, synthetic construct
  source 1..127: note = RNF125 URD (2-128) peptide
GSVLSTDSGKSAPASATARALERRRDPELPVTSFDCAVCLEVLHQPVRTRCGHVFCRSCIATSLKNNKWTCPYCRAYLPSEGVPATDVAKRMKSEYKNCAECDTLVCLSEMRAHIRTCQKYIDKYGP

SEQ ID NO: 32 - protein, 100 aa, synthetic construct
  source 1..100: note = RNF138 URD (14-113) peptide
DDFYCPVCQEVLKTPVRTTACQHVFCRKCFLTAMRESGAHCPLCRGNVTRRERACPERALDLENIMRKFSGSCRCCAKQIKFYRMRHHYKSCKKYQDEYG

SEQ ID NO: 33 - protein, 101 aa, synthetic construct
  source 1..101: note = RNF166 URD (26-126) peptide
GLEAQYTCPICLEVYHRPVAIGSCGHTFCGECLQPCLQVPSPLCPLCRLPFDPKKVDKATHVEKQLSSYKAPCRGCNKKVTLAKMRVHISSCLKVQEQMAN

SEQ ID NO: 34 - protein, 92 aa, synthetic construct
  source 1..92: note = NHLRC1 URD (7-98) peptide
ESGPALHELMREAEISLLECKVCFEKFGHRQQRRPRNLSCGHVVCLACVAALAHPRTLALECPFCRRACRGCDTSDCLPVLHLIELLGSALR

SEQ ID NO: 35 - protein, 79 aa, synthetic construct
  source 1..79: note = CBL-b (Y363E) URD (349-427) peptide
PHDHIKVTQEQYELECEMGSTFQLCKICAENDKDVKIEPCGHLMCTSCLTAWQESDGQGCPFCRCEIKGTEPIIVDPFD

SEQ ID NO: 36 - protein, 277 aa, synthetic construct
  source 1..277: note = TRIM21 URD (1-277) peptide
MASAARLTMMWEEVTCPICLDPFVEPVSIECGHSFCQECISQVGKGGGSVCPVCRQRFLLKNLRPNRQLANMVNNLKEISQEAREGTQGERCAVHGERLHLFCEKDGKALCWVCAQSRKHRDHAMVPLEEAAQEYQEKLQVALGELRRKQELAEKLEVEIAIKRADWKKTVETQKSRIHAEFVQQKNFLVEEEQRQLQELEKDEREQLRILGEKEAKLAQQSQALQELISELDRRCHSSALELLQEVIIVLERSESWNLKDLDITSPELRSVCHVPG

SEQ ID NO: 37 - protein, 356 aa, synthetic construct
  source 1..356: note = E6AP URD (520-875) peptide
NPYLRLKVRRDHIIDDALVRLEMIAMENPADLKKQLYVEFEGEQGVDEGGVSKEFFQLVVEEIFNPDIGMFTYDESTKLFWFNPSSFETEGQFTLIGIVLGLAIYNNCILDVHFPMVVYRKLMGKKGTFRDLGDSHPVLYQSLKDLLEYEGNVEDDMMITFQISQTDLFGNPMMYDLKENGDKIPITNENRKEFVNLYSDYILNKSVEKQFKAFRRGFHMVTNESPLKYLFRPEEIELLICGSRNLDFQALEETTEYDGGYTRDSVLIREFWEIVHSFTDEQKRLFLQFTTGTDRAPVGGLGKLKMIIAKNGPDTERLPTSHTCFNVLLLPEYSSKEKLKERLLKAITYAKGFGML

SEQ ID NO: 38 - protein, 367 aa, synthetic construct
  source 1..367: note = FBXW7 alpha URD (2-368) W365S peptide
NQELLSVGSKRRRTGGSLRGNPSSSQVDEEQMNRVVEEEQQQQLRQQEEEHTARNGEVVGVEPRPGGQNDSQQGQLEENNNRFISVDEDSSGNQEEQEEDEEHAGEQDEEDEEEEEMDQESDDFDQSDDSSREDEHTHTNSVTNSSSIVDLPVHQLSSPFYTKTTKMKRKLDHGSEVRSFSLGKKPCKVSEYTSTTGLVPCSATPTTFGDLRAANGQGQQRRRITSVQPPTGLQEWLKMFQSWSGPEKLLALDELIDSCEPTQVKHMMQVIEPQFQRDFISLLPKELALYVLSFLEPKDLLQAAQTCRYWRILAEDNLLWREKCKEEGIDEPLHIKRRKVIKPGFIHSPWKSAYIRQHRIDTNSRRG

SEQ ID NO: 39 - protein, 287 aa, synthetic construct
  source 1..287: note = FBXW7 beta URD (2-228) W285S peptide
CVPRSGLILSCICLYCGVLLPVLLPNLPFLTCLSMSTLESVTYLPEKGLYCQRLPSSRTHGGTESLKGKNTENMGFYGTLKMIFYKMKRKLDHGSEVRSFSLGKKPCKVSEYTSTTGLVPCSATPTTFGDLRAANGQGQQRRRITSVQPPTGLQEWLKMFQSWSGPEKLLALDELIDSCEPTQVKHMMQVIEPQFQRDFISLLPKELALYVLSFLEPKDLLQAAQTCRYWRILAEDNLLWREKCKEEGIDEPLHIKRRKVIKPGFIHSPWKSAYIRQHRIDTNSRRG

SEQ ID NO: 40 - protein, 286 aa, synthetic construct
  source 1..286: note = beta-TRCP URD (2-287) W286S peptide
DPAEAVLQEKALKFMCSMPRSLWLGCSSLADSMPSLRCLYNPGTGALTAFQNSSEREDCNNGEPPRKIIPEKNSLRQTYNSCARLCLNQETVCLASTAMKTENCVAKTKLANGTSSMIVPKQRKLSASYEKEKELCVKYFEQWSESDQVEFVEHLISQMCHYQHGHINSYLKPMLQRDFITALPARGLDHIAENILSYLDAKSLCAAELVCKEWYRVTSDGMLWKKLIERMVRTDSLWRGLAERRGWGQYLFKNKPPDGNAPPNSFYRALYPKIIQDIETIESNSR

SEQ ID NO: 41 - protein, 321 aa, synthetic construct
  source 1..321: note = Keap1 URD (2-322) peptide
QPDPRPSGAGACCRFLPLQSQCPEGAGDAVMYASTECKAEVTPSQHGNRTFSYTLEDHTKQAFGIMNELRLSQQLCDVTLQVKYQDAPAAQFMAHKVVLASSSPVFKAMFTNGLREQGMEVVSIEGIHPKVMERLIEFAYTASISMGEKCVLHVMNGAVMYQIDSVVRACSDFLVQQLDPSNAIGIANFAEQIGCVELHQRAREYIYMHFGEVAKQEEFFNLSHCQLVTLISRDDLNVRCESEVFHACINWVKYDCEQRRFYVQALLRAVRCHSLTPNFLQMQLQKCEILQSDSRCKDYLVKIFEELTLHKPTQVMPCRAP

SEQ ID NO: 42 - protein, 228 aa, synthetic construct
  source 1..228: note = SPOP URD (147-374) peptide
NGLLPDDKLTLFCEVSVVQDSVNISGQNTMNMVKVPECRLADELGGLWENSRFTDCCLCVAGQEFQAHKAILAARSPVFSAMFEHEMEESKKNRVEINDVEPEVFKEMMCFIYTGKAPNLDKMADDLLAAADKYALERLKVMCEDALCSNLSVENAAEILILADLHSADQLKTQAVDFINYHASDVLETSGWKSMVVSHPHLVAEAYRSLASAQCPFLGPPRKRLKQS

SEQ ID NO: 43 - protein, 35 aa, synthetic construct
  source 1..35: note = DCAF1 truncated URD (1045-1079) peptide
QAPINFTSRLNRRASFPKYGGVDGGCFDRHLIFSR

SEQ ID NO: 44 - skipped

SEQ ID NO: 45 - protein, 4 aa, synthetic construct
  source 1..4: note = 2xGS linker peptide
GSGS

SEQ ID NO: 46 - protein, 6 aa, synthetic construct
  source 1..6: note = 3xGS linker peptide
GSGSGS

SEQ ID NO: 47 - protein, 8 aa, synthetic construct
  source 1..8: note = 4xGS linker peptide
GSGSGSGS

SEQ ID NO: 48 - protein, 10 aa, synthetic construct
  source 1..10: note = 5xGS linker peptide
GSGSGSGSGS

SEQ ID NO: 49 - protein, 12 aa, synthetic construct
  source 1..12: note = 6xGS linker peptide
GSGSGSGSGSGS

SEQ ID NO: 50 - protein, 9 aa, synthetic construct
  source 1..9: note = HA epitope tag peptide
YPYDVPDYA

SEQ ID NO: 51 - protein, 9 aa, synthetic construct
  source 1..9: note = nuclear localization signal (NLS) peptide
PAAKRVKLD

SEQ ID NO: 52 - protein, 279 aa, synthetic construct
  source 1..279: note = HA-NLS-3DX.1
MYPYDVPDYAPAAKRVKLDGSGSGSEVKLVESGGDLVKPGGSLKLSCAASGFTFSHYGMSWVRQTPDKRLEWVATIGSRGTYTHYPDSVKGRFTISRDNDKNALYLQMNSLRTEDTAMYYCARKSEFYYYGNTYYYSAMDYWGQGASVTVSSGGGGSGGGDSGGGGSDIVLTQSPASLAVSLGQRATISCRASESVDNYGFSFMNWFQQKPGQPPKLLIYATSNRGSGVPARFSGSGSGTDFSLNIHPVEEDDSAMYFCQQTKEVPWTFGGGTKLEIKR

SEQ ID NO: 53 - protein, 279 aa, synthetic construct
  source 1..279: note = HA-NLS-3DX.2
MYPYDVPDYAPAAKRVKLDGSGSGSDIVLTQSPASLAVSLGQRATISCRASESVDNYGFSFMNWFQQKPGQPPKLLIYATSNRGSGVPARFSGSGSGTDFSLNIHPVEEDDSAMYFCQQTKEVPWTFGGGTKLEIKRGGGGSGGGDSGGGGSEVKLVESGGDLVKPGGSLKLSCAASGFTFSHYGMSWVRQTPDKRLEWVATIGSRGTYTHYPDSVKGRFTISRDNDKNALYLQMNSLRTEDTAMYYCARKSEFYYYGNTYYYSAMDYWGQGASVTVSS

SEQ ID NO: 54 - protein, 117 aa, synthetic construct
  source 1..117: note = HA-NLS-OMOMYC
MYPYDVPDYAPAAKRVKLDGSGSGSSDTEENVKRRTHNVLERQRRNELKRSFFALRDQIPELENNEKAPKVVILKKATAYILSVQAETQKLISEIDLLRKQNEQLKHKLEQLRNSCA

SEQ ID NO: 55 - protein, 112 aa, synthetic construct
  source 1..112: note = HA-NLS-FOXP3 DBD
MYPYDVPDYAPAAKRVKLDGSGSGSRPPFTYATLIRWAILEAPEKQRTLNEIYHWFTRMFAFFRNHPATWKNAIRHNLSLHKCFVRVESEKGAVWTVDELEFRKKRSQRPSR

SEQ ID NO: 56 - protein, 139 aa, synthetic construct
  source 1..139: note = HA-NLS-VL12.3
MYPYDVPDYAPAAKRVKLDGSGSGSGSQPVLTQSPSVSAAPRQRVTISVSGSNSNIGSNTVNWIQQLPGRAPELLMYDDDLLAPGVSDRFSGSRSGTSASLTISGLQSEDEADYYAATWDDSLNGWVFGGGTKVTVLSG

SEQ ID NO: 57 - protein, 130 aa, synthetic construct
  source 1..130: note = HA-VL12.3
MYPYDVPDYAGSGSGSGSQPVLTQSPSVSAAPRQRVTISVSGSNSNIGSNTVNWIQQLPGRAPELLMYDDDLLAPGVSDRFSGSRSGTSASLTISGLQSEDEADYYAATWDDSLNGWVFGGGTKVTVLSG

SEQ ID NO: 58 - protein, 70 aa, synthetic construct
  source 1..70: note = HA-NLS-TCF4
MYPYDVPDYAPAAKRVKLDGSGSGSDDLGANDELISFKDEGEQEEKSSENSSAERDLADVKSSLVNESET

SEQ ID NO: 59 - protein, 61 aa, synthetic construct
  source 1..61: note = HA-TCF4
MYPYDVPDYAGSGSGSDDLGANDELISFKDEGEQEEKSSENSSAERDLADVKSSLVNESET

SEQ ID NO: 60 - protein, 147 aa, synthetic construct
  source 1..147: note = HA-NLS-BC2
MYPYDVPDYAPAAKRVKLDGSGSGSQVQLVESGGGLVQPGGSLTLSCTASGFTLDHYDIGWFRQAPGKEREGVSCINNSDDDTYYADSVKGRFTIFMNNAKDTVYLQMNSLKPEDTAIYYCAEARGCKRGRYEYDFWGQGTQVTVSS

SEQ ID NO: 61 - protein, 138 aa, synthetic construct
  source 1..138: note = HA-BC2
MYPYDVPDYAGSGSGSQVQLVESGGGLVQPGGSLTLSCTASGFTLDHYDIGWFRQAPGKEREGVSCINNSDDDTYYADSVKGRFTIFMNNAKDTVYLQMNSLKPEDTAIYYCAEARGCKRGRYEYDFWGQGTQVTVSS

SEQ ID NO: 62 - protein, 614 aa, synthetic construct
  source 1..614: note = HA-bTRCP
MYPYDVPDYADPAEAVLQEKALKFMCSMPRSLWLGCSSLADSMPSLRCLYNPGTGALTAFQNSSEREDCNNGEPPRKIIPEKNSLRQTYNSCARLCLNQETVCLASTAMKTENCVAKTKLANGTSSMIVPKQRKLSASYEKEKELCVKYFEQWSESDQVEFVEHLISQMCHYQHGHINSYLKPMLQRDFITALPARGLDHIAENILSYLDAKSLCAAELVCKEWYRVTSDGMLWKKLIERMVRTDSLWRGLAERRGWGQYLFKNKPPDGNAPPNSFYRALYPKIIQDIETIESNWRCGRHSLQRIHCRSETSKGVYCLQYDDQKIVSGLRDNTIKIWDKNTLECKRILTGHTGSVLCLQYDERVIITGSSDSTVRVWDVNTGEMLNTLIHHCEAVLHLRFNNGMMVTCSKDRSIAVWDMASPTDITLRRVLVGHRAAVNVVDFDDKYIVSASGDRTIKVWNTSTCEFVRTLNGHKRGIACLQYRDRLVVSGSSDNTIRLWDIECGACLRVLEGHEELVRCIRFDNKRIVSGAYDGKIKVWDLVAALDPRAPAGTLCLRTLVEHSGRVFRLQFDEFQIVSSSHDDTILIWDFLNDPAAQAEPPRSPSRTYTYISR

SEQ ID NO: 63 - protein, 276 aa, synthetic construct
  source 1..276: note = HA-NLS-INT41
MYPYDVPDYAPAAKRVKLDGSGSGSAEVQLVVSGGGLVKPGGSMILSCAASGFTFSNYSMNWVRQAPGKGLEWVSSISSSSEYIYYADFVKGRFTISRDNAKNSLYLQMDSLRAEDTAVYYCAWPGYRKAWGRGTLVTVSSGGGGSGGGGSGGGGSQSVLTQPASVSGSPGQSITISCAGTSSDVGGYNYVSWYQQHPGKAPKLMIYEDSKRPSGVSNRFSGSKSGNTASLTISGLRAEDEADYYCSYCASKGHWLFGGGTKLAVLGAAAEQKLIS

SEQ ID NO: 64 - protein, 267 aa, synthetic construct
  source 1..267: note = HA-INT41
MYPYDVPDYAGSGSGSAEVQLVVSGGGLVKPGGSMILSCAASGFTFSNYSMNWVRQAPGKGLEWVSSISSSSEYIYYADFVKGRFTISRDNAKNSLYLQMDSLRAEDTAVYYCAWPGYRKAWGRGTLVTVSSGGGGSGGGGSGGGGSQSVLTQPASVSGSPGQSITISCAGTSSDVGGYNYVSWYQQHPGKAPKLMIYEDSKRPSGVSNRFSGSKSGNTASLTISGLRAEDEADYYCSYCASKGHWLFGGGTKLAVLGAAAEQKLIS

SEQ ID NO: 65 - protein, 884 aa, synthetic construct
  source 1..884: note = HA-E6AP
MYPYDVPDYAEKLHQCYWKSGEPQSDDIEASRMKRAAAKHLIERYYHQLTEGCGNEACTNEFCASCPTFLRMDNNAAAIKALELYKINAKLCDPHPSKKGASSAYLENSKGAPNNSCSEIKMNKKGARIDFKDVTYLTEEKVYEILELCREREDYSPLIRVIGRVFSSAEALVQSFRKVKQHTKEELKSLQAKDEDKDEDEKEKAACSAAAMEEDSEASSSRIGDSSQGDNNLQKLGPDDVSVDIDAIRRVYTRLLSNEKIETAFLNALVYLSPNVECDLTYHNVYSRDPNYLNLFIIVMENRNLHSPEYLEMALPLFCKAMSKLPLAAQGKLIRLWSKYNADQIRRMMETFQQLITYKVISNEFNSRNLVNDDDAIVAASKCLKMVYYANVVGGEVDTNHNEEDDEEPIPESSELTLQELLGEERRNKKGPRVDPLETELGVKTLDCRKPLIPFEEFINEPLNEVLEMDKDYTFFKVETENKFSFMTCPFILNAVTKNLGLYYDNRIRMYSERRITVLYSLVQGQQLNPYLRLKVRRDHIIDDALVRLEMIAMENPADLKKQLYVEFEGEQGVDEGGVSKEFFQLVVEEIFNPDIGMFTYDESTKLFWFNPSSFETEGQFTLIGIVLGLAIYNNCILDVHFPMVVYRKLMGKKGTFRDLGDSHPVLYQSLKDLLEYEGNVEDDMMITFQISQTDLFGNPMMYDLKENGDKIPITNENRKEFVNLYSDYILNKSVEKQFKAFRRGFHMVTNESPLKYLFRPEEIELLICGSRNLDFQALEETTEYDGGYTRDSVLIREFWEIVHSFTDEQKRLFLQFTTGTDRAPVGGLGKLKMIIAKNGPDTERLPTSHTCFNVLLLPEYSSKEKLKERLLKAITYAKGFGML

SEQ ID NO: 66 - protein, 716 aa, synthetic construct
  source 1..716: note = HA-FBXW7 alpha(WT) peptide
MYPYDVPDYANQELLSVGSKRRRTGGSLRGNPSSSQVDEEQMNRVVEEEQQQQLRQQEEEHTARNGEVVGVEPRPGGQNDSQQGQLEENNNRFISVDEDSSGNQEEQEEDEEHAGEQDEEDEEEEEMDQESDDFDQSDDSSREDEHTHTNSVTNSSSIVDLPVHQLSSPFYTKTTKMKRKLDHGSEVRSFSLGKKPCKVSEYTSTTGLVPCSATPTTFGDLRAANGQGQQRRRITSVQPPTGLQEWLKMFQSWSGPEKLLALDELIDSCEPTQVKHMMQVIEPQFQRDFISLLPKELALYVLSFLEPKDLLQAAQTCRYWRILAEDNLLWREKCKEEGIDEPLHIKRRKVIKPGFIHSPWKSAYIRQHRIDTNWRRGELKSPKVLKGHDDHVITCLQFCGNRIVSGSDDNTLKVWSAVTGKCLRTLVGHTGGVWSSQMRDNIIISGSTDRTLKVWNAETGECIHTLYGHTSTVRCMHLHEKRVVSGSRDATLRVWDIETGQCLHVLMGHVAAVRCVQYDGRRVVSGAYDFMVKVWDPETETCLHTLQGHTNRVYSLQFDGIHVVSGSLDTSIRVWDVETGNCIHTLTGHQSLTSGMELKDNILVSGNADSTVKIWDIKTGQCLQTLQGPNKHQSAVTCLQFNKNFVITSSDDGTVKLWDLKTGEFIRNLVTLESGGSGGVVWRIRASNTKLVCAVGSRNGTEETKLLVLDFDVDMK

SEQ ID NO: 67 - protein, 716 aa, synthetic construct
  source 1..716: note = HA-FBXW7 alpha (R456C) peptide
MYPYDVPDYANQELLSVGSKRRRTGGSLRGNPSSSQVDEEQMNRVVEEEQQQQLRQQEEEHTARNGEVVGVEPRPGGQNDSQQGQLEENNNRFISVDEDSSGNQEEQEEDEEHAGEQDEEDEEEEEMDQESDDFDQSDDSSREDEHTHTNSVTNSSSIVDLPVHQLSSPFYTKTTKMKRKLDHGSEVRSFSLGKKPCKVSEYTSTTGLVPCSATPTTFGDLRAANGQGQQRRRITSVQPPTGLQEWLKMFQSWSGPEKLLALDELIDSCEPTQVKHMMQVIEPQFQRDFISLLPKELALYVLSFLEPKDLLQAAQTCRYWRILAEDNLLWREKCKEEGIDEPLHIKRRKVIKPGFIHSPWKSAYIRQHRIDTNWRRGELKSPKVLKGHDDHVITCLQFCGNRIVSGSDDNTLKVWSAVTGKCLRTLVGHTGGVWSSQMRDNIIISGSTDRTLKVWNAETGECIHTLYGHTSTVCCMHLHEKRVVSGSRDATLRVWDIETGQCLHVLMGHVAAVRCVQYDGRRVVSGAYDFMVKVWDPETETCLHTLQGHTNRVYSLQFDGIHVVSGSLDTSIRVWDVETGNCIHTLTGHQSLTSGMELKDNILVSGNADSTVKIWDIKTGQCLQTLQGPNKHQSAVTCLQFNKNFVITSSDDGTVKLWDLKTGEFIRNLVTLESGGSGGVVWRIRASNTKLVCAVGSRNGTEETKLLVLDFDVDMK

SEQ ID NO: 68 - protein, 716 aa, synthetic construct
  source 1..716: note = HA-FBXW7 alpha S10N, S18N, S176N, T205N peptide
MYPYDVPDYANQELLSVGNKRRRTGGNLRGNPSSSQVDEEQMNRVVEEEQQQQLRQQEEEHTARNGEVVGVEPRPGGQNDSQQGQLEENNNRFISVDEDSSGNQEEQEEDEEHAGEQDEEDEEEEEMDQESDDFDQSDDSSREDEHTHTNSVTNSSSIVDLPVHQLSSPFYTKTTKMKRKLDHGNEVRSFSLGKKPCKVSEYTSTTGLVPCSANPTTFGDLRAANGQGQQRRRITSVQPPTGLQEWLKMFQSWSGPEKLLALDELIDSCEPTQVKHMMQVIEPQFQRDFISLLPKELALYVLSFLEPKDLLQAAQTCRYWRILAEDNLLWREKCKEEGIDEPLHIKRRKVIKPGFIHSPWKSAYIRQHRIDTNWRRGELKSPKVLKGHDDHVITCLQFCGNRIVSGSDDNTLKVWSAVTGKCLRTLVGHTGGVWSSQMRDNIIISGSTDRTLKVWNAETGECIHTLYGHTSTVRCMHLHEKRVVSGSRDATLRVWDIETGQCLHVLMGHVAAVRCVQYDGRRVVSGAYDFMVKVWDPETETCLHTLQGHTNRVYSLQFDGIHVVSGSLDTSIRVWDVETGNCIHTLTGHQSLTSGMELKDNILVSGNADSTVKIWDIKTGQCLQTLQGPNKHQSAVTCLQFNKNFVITSSDDGTVKLWDLKTGEFIRNLVTLESGGSGGVVWRIRASNTKLVCAVGSRNGTEETKLLVLDFDVDMK

SEQ ID NO: 69 - DNA, 2151 bp, synthetic construct
  source 1..2151: mol_type = other DNA; note = HA-FBXW7 alpha(WT) nucleic acid
atgtacccatacgatgttccagattacgctaatcaggaactgctctctgtgggcagcaaaagacgacgaactggaggctctctgagaggtaacccttcctcaagccaggtagatgaagaacagatgaatcgtgtggtagaggaggaacagcaacagcaactcagacaacaagaggaggagcacactgcaaggaatggtgaagttgttggagtagaacctagacctggaggccaaaatgattcccagcaaggacagttggaagaaaacaataatagatttatttcggtagatgaggactcctcaggaaaccaagaagaacaagaggaagatgaagaacatgctggtgaacaagatgaggaggatgaggaggaggaggagatggaccaggagagtgacgattttgatcagtctgatgatagtagcagagaagatgaacatacacatactaacagtgtcacgaactccagtagtattgtggacctgcccgttcaccaactctcctccccattctatacaaaaacaacaaaaatgaaaagaaagttggaccatggttctgaggtccgctctttttctttgggaaagaaaccatgcaaagtctcagaatatacaagtaccactgggcttgtaccatgttcagcaacaccaacaacttttggggacctcagagcagccaatggccaagggcaacaacgacgccgaattacatctgtccagccacctacaggcctccaggaatggctaaaaatgtttcagagctggagtggaccagagaaattgcttgctttagatgaactcattgatagttgtgaaccaacacaagtaaaacatatgatgcaagtgatagaaccccagtttcaacgagacttcatttcattgctccctaaagagttggcactctatgtgctttcattcctggaacccaaagacctgctacaagcagctcagacatgtcgctactggagaattttggctgaagacaaccttctctggagagagaaatgcaaagaagaggggattgatgaaccattgcacatcaagagaagaaaagtaataaaaccaggtttcatacacagtccatggaaaagtgcatacatcagacagcacagaattgatactaactggaggcgaggagaactcaaatctcctaaggtgctgaaaggacatgatgatcatgtgatcacatgcttacagttttgtggtaaccgaatagttagtggttctgatgacaacactttaaaagtttggtcagcagtcacaggcaaatgtctgagaacattagtgggacatacaggtggagtatggtcatcacaaatgagagacaacatcatcattagtggatctacagatcggacactcaaagtgtggaatgcagagactggagaatgtatacacaccttatatgggcatacttccactgtgcgttgtatgcatcttcatgaaaaaagagttgttagcggttctcgagatgccactcttagggtttgggatattgagacaggccagtgtttacatgttttgatgggtcatgttgcagcagtccgctgtgttcaatatgatggcaggagggttgttagtggagcatatgattttatggtaaaggtgtgggatccagagactgaaacctgtctacacacgttgcaggggcatactaatagagtctattcattacagtttgatggtatccatgtggtgagtggatctcttgatacatcaatccgtgtttgggatgtggagacagggaattgcattcacacgttaacagggcaccagtcgttaacaagtggaatggaactcaaagacaatattcttgtctctgggaatgcagattctacagttaaaatctgggatatcaaaacaggacagtgtttacaaacattgcaaggtcccaacaagcatcagagtgctgtgacctgtttacagttcaacaagaactttgtaattaccagctcagatgatggaactgtaaaactatgggacttgaaaacgggtgaatttattcgaaacctagtcacattggagagtggggggagtgggggagttgtgtggcggatcagagcctcaaacacaaagctggtgtgtgcagttgggagtcggaatgggactgaagaaaccaagctgctggtgctggactttgatgtggacatgaagtga

SEQ ID NO: 70 - DNA, 2151 bp, synthetic construct
  source 1..2151: mol_type = other DNA; note = HA-FBXW7 alpha (R456C) nucleic acid
atgtacccatacgatgttccagattacgctaatcaggaactgctctctgtgggcagcaaaagacgacgaactggaggctctctgagaggtaacccttcctcaagccaggtagatgaagaacagatgaatcgtgtggtagaggaggaacagcaacagcaactcagacaacaagaggaggagcacactgcaaggaatggtgaagttgttggagtagaacctagacctggaggccaaaatgattcccagcaaggacagttggaagaaaacaataatagatttatttcggtagatgaggactcctcaggaaaccaagaagaacaagaggaagatgaagaacatgctggtgaacaagatgaggaggatgaggaggaggaggagatggaccaggagagtgacgattttgatcagtctgatgatagtagcagagaagatgaacatacacatactaacagtgtcacgaactccagtagtattgtggacctgcccgttcaccaactctcctccccattctatacaaaaacaacaaaaatgaaaagaaagttggaccatggttctgaggtccgctctttttctttgggaaagaaaccatgcaaagtctcagaatatacaagtaccactgggcttgtaccatgttcagcaacaccaacaacttttggggacctcagagcagccaatggccaagggcaacaacgacgccgaattacatctgtccagccacctacaggcctccaggaatggctaaaaatgtttcagagctggagtggaccagagaaattgcttgctttagatgaactcattgatagttgtgaaccaacacaagtaaaacatatgatgcaagtgatagaaccccagtttcaacgagacttcatttcattgctccctaaagagttggcactctatgtgctttcattcctggaacccaaagacctgctacaagcagctcagacatgtcgctactggagaattttggctgaagacaaccttctctggagagagaaatgcaaagaagaggggattgatgaaccattgcacatcaagagaagaaaagtaataaaaccaggtttcatacacagtccatggaaaagtgcatacatcagacagcacagaattgatactaactggaggcgaggagaactcaaatctcctaaggtgctgaaaggacatgatgatcatgtgatcacatgcttacagttttgtggtaaccgaatagttagtggttctgatgacaacactttaaaagtttggtcagcagtcacaggcaaatgtctgagaacattagtgggacatacaggtggagtatggtcatcacaaatgagagacaacatcatcattagtggatctacagatcggacactcaaagtgtggaatgcagagactggagaatgtatacacaccttatatgggcatacttccactgtgtgttgtatgcatcttcatgaaaaaagagttgttagcggttctcgagatgccactcttagggtttgggatattgagacaggccagtgtttacatgttttgatgggtcatgttgcagcagtccgctgtgttcaatatgatggcaggagggttgttagtggagcatatgattttatggtaaaggtgtgggatccagagactgaaacctgtctacacacgttgcaggggcatactaatagagtctattcattacagtttgatggtatccatgtggtgagtggatctcttgatacatcaatccgtgtttgggatgtggagacagggaattgcattcacacgttaacagggcaccagtcgttaacaagtggaatggaactcaaagacaatattcttgtctctgggaatgcagattctacagttaaaatctgggatatcaaaacaggacagtgtttacaaacattgcaaggtcccaacaagcatcagagtgctgtgacctgtttacagttcaacaagaactttgtaattaccagctcagatgatggaactgtaaaactatgggacttgaaaacgggtgaatttattcgaaacctagtcacattggagagtggggggagtgggggagttgtgtggcggatcagagcctcaaacacaaagctggtgtgtgcagttgggagtcggaatgggactgaagaaaccaagctgctggtgctggactttgatgtggacatgaagtga

SEQ ID NO: 71 - DNA, 2151 bp, synthetic construct
  source 1..2151: mol_type = other DNA; note = HA-FBXW7 alpha S10N, S18N, S176N, T205N nucleic acid
atgtacccatacgatgttccagattacgctaatcaggaactgctctctgtgggcaacaaaagacgacgaactggaggcaatctgagaggtaacccttcctcaagccaggtagatgaagaacagatgaatcgtgtggtagaggaggaacagcaacagcaactcagacaacaagaggaggagcacactgcaaggaatggtgaagttgttggagtagaacctagacctggaggccaaaatgattcccagcaaggacagttggaagaaaacaataatagatttatttcggtagatgaggactcctcaggaaaccaagaagaacaagaggaagatgaagaacatgctggtgaacaagatgaggaggatgaggaggaggaggagatggaccaggagagtgacgattttgatcagtctgatgatagtagcagagaagatgaacatacacatactaacagtgtcacgaactccagtagtattgtggacctgcccgttcaccaactctcctccccattctatacaaaaacaacaaaaatgaaaagaaagttggaccatggtaatgaggtccgctctttttctttgggaaagaaaccatgcaaagtctcagaatatacaagtaccactgggcttgtaccatgttcagcaaatccaacaacttttggggacctcagagcagccaatggccaagggcaacaacgacgccgaattacatctgtccagccacctacaggcctccaggaatggctaaaaatgtttcagagctggagtggaccagagaaattgcttgctttagatgaactcattgatagttgtgaaccaacacaagtaaaacatatgatgcaagtgatagaaccccagtttcaacgagacttcatttcattgctccctaaagagttggcactctatgtgctttcattcctggaacccaaagacctgctacaagcagctcagacatgtcgctactggagaattttggctgaagacaaccttctctggagagagaaatgcaaagaagaggggattgatgaaccattgcacatcaagagaagaaaagtaataaaaccaggtttcatacacagtccatggaaaagtgcatacatcagacagcacagaattgatactaactggaggcgaggagaactcaaatctcctaaggtgctgaaaggacatgatgatcatgtgatcacatgcttacagttttgtggtaaccgaatagttagtggttctgatgacaacactttaaaagtttggtcagcagtcacaggcaaatgtctgagaacattagtgggacatacaggtggagtatggtcatcacaaatgagagacaacatcatcattagtggatctacagatcggacactcaaagtgtggaatgcagagactggagaatgtatacacaccttatatgggcatacttccactgtgcgttgtatgcatcttcatgaaaaaagagttgttagcggttctcgagatgccactcttagggtttgggatattgagacaggccagtgtttacatgttttgatgggtcatgttgcagcagtccgctgtgttcaatatgatggcaggagggttgttagtggagcatatgattttatggtaaaggtgtgggatccagagactgaaacctgtctacacacgttgcaggggcatactaatagagtctattcattacagtttgatggtatccatgtggtgagtggatctcttgatacatcaatccgtgtttgggatgtggagacagggaattgcattcacacgttaacagggcaccagtcgttaacaagtggaatggaactcaaagacaatattcttgtctctgggaatgcagattctacagttaaaatctgggatatcaaaacaggacagtgtttacaaacattgcaaggtcccaacaagcatcagagtgctgtgacctgtttacagttcaacaagaactttgtaattaccagctcagatgatggaactgtaaaactatgggacttgaaaacgggtgaatttattcgaaacctagtcacattggagagtggggggagtgggggagttgtgtggcggatcagagcctcaaacacaaagctggtgtgtgcagttgggagtcggaatgggactgaagaaaccaagctgctggtgctggactttgatgtggacatgaagtga

SEQ ID NO: 72 - protein, 446 aa, synthetic construct
  source 1..446: note = 3DX.1-(GS)1-CHIP-NLS peptide
MEVKLVESGGDLVKPGGSLKLSCAASGFTFSHYGMSWVRQTPDKRLEWVATIGSRGTYTHYPDSVKGRFTISRDNDKNALYLQMNSLRTEDTAMYYCARKSEFYYYGNTYYYSAMDYWGQGASVTVSSGGGGSGGGDSGGGGSDIVLTQSPASLAVSLGQRATISCRASESVDNYGFSFMNWFQQKPGQPPKLLIYATSNRGSGVPARFSGSGSGTDFSLNIHPVEEDDSAMYFCQQTKEVPWTFGGGTKLEIKRGSRLNFGDDIPSALRIAKKKRWNSIEERRIHQESELHSYLSRLIAAERERELEECQRNHEGDEDDSHVRAQQACIEAKHDKYMADMDELFSQVDEKRKKRDIPDYLCGKISFELMREPCITPSGITYDRKDIEEHLQRVGHFDPVTRSPLTQEQLIPNLAMKEVIDAFISENGWVEDYGSGSPAAKRVKLD

SEQ ID NO: 73 - protein, 448 aa, synthetic construct
  source 1..448: note = 3DX.1-(GS)2-CHIP-NLS peptide
MEVKLVESGGDLVKPGGSLKLSCAASGFTFSHYGMSWVRQTPDKRLEWVATIGSRGTYTHYPDSVKGRFTISRDNDKNALYLQMNSLRTEDTAMYYCARKSEFYYYGNTYYYSAMDYWGQGASVTVSSGGGGSGGGDSGGGGSDIVLTQSPASLAVSLGQRATISCRASESVDNYGFSFMNWFQQKPGQPPKLLIYATSNRGSGVPARFSGSGSGTDFSLNIHPVEEDDSAMYFCQQTKEVPWTFGGGTKLEIKRGSGSRLNFGDDIPSALRIAKKKRWNSIEERRIHQESELHSYLSRLIAAERERELEECQRNHEGDEDDSHVRAQQACIEAKHDKYMADMDELFSQVDEKRKKRDIPDYLCGKISFELMREPCITPSGITYDRKDIEEHLQRVGHFDPVTRSPLTQEQLIPNLAMKEVIDAFISENGWVEDYGSGSPAAKRVKLD

SEQ ID NO: 74 - protein, 450 aa, synthetic construct
  source 1..450: note = 3DX.1-(GS)3-CHIP-NLS peptide
MEVKLVESGGDLVKPGGSLKLSCAASGFTFSHYGMSWVRQTPDKRLEWVATIGSRGTYTHYPDSVKGRFTISRDNDKNALYLQMNSLRTEDTAMYYCARKSEFYYYGNTYYYSAMDYWGQGASVTVSSGGGGSGGGDSGGGGSDIVLTQSPASLAVSLGQRATISCRASESVDNYGFSFMNWFQQKPGQPPKLLIYATSNRGSGVPARFSGSGSGTDFSLNIHPVEEDDSAMYFCQQTKEVPWTFGGGTKLEIKRGSGSGSRLNFGDDIPSALRIAKKKRWNSIEERRIHQESELHSYLSRLIAAERERELEECQRNHEGDEDDSHVRAQQACIEAKHDKYMADMDELFSQVDEKRKKRDIPDYLCGKISFELMREPCITPSGITYDRKDIEEHLQRVGHFDPVTRSPLTQEQLIPNLAMKEVIDAFISENGWVEDYGSGSPAAKRVKLD

SEQ ID NO: 75 - protein, 452 aa, synthetic construct
  source 1..452: note = 3DX.1-(GS)4-CHIP-NLS peptide
MEVKLVESGGDLVKPGGSLKLSCAASGFTFSHYGMSWVRQTPDKRLEWVATIGSRGTYTHYPDSVKGRFTISRDNDKNALYLQMNSLRTEDTAMYYCARKSEFYYYGNTYYYSAMDYWGQGASVTVSSGGGGSGGGDSGGGGSDIVLTQSPASLAVSLGQRATISCRASESVDNYGFSFMNWFQQKPGQPPKLLIYATSNRGSGVPARFSGSGSGTDFSLNIHPVEEDDSAMYFCQQTKEVPWTFGGGTKLEIKRGSGSGSGSRLNFGDDIPSALRIAKKKRWNSIEERRIHQESELHSYLSRLIAAERERELEECQRNHEGDEDDSHVRAQQACIEAKHDKYMADMDELFSQVDEKRKKRDIPDYLCGKISFELMREPCITPSGITYDRKDIEEHLQRVGHFDPVTRSPLTQEQLIPNLAMKEVIDAFISENGWVEDYGSGSPAAKRVKLD

SEQ ID NO: 76 - protein, 454 aa, synthetic construct
  source 1..454: note = 3DX.1-(GS)5-CHIP-NLS peptide
MEVKLVESGGDLVKPGGSLKLSCAASGFTFSHYGMSWVRQTPDKRLEWVATIGSRGTYTHYPDSVKGRFTISRDNDKNALYLQMNSLRTEDTAMYYCARKSEFYYYGNTYYYSAMDYWGQGASVTVSSGGGGSGGGDSGGGGSDIVLTQSPASLAVSLGQRATISCRASESVDNYGFSFMNWFQQKPGQPPKLLIYATSNRGSGVPARFSGSGSGTDFSLNIHPVEEDDSAMYFCQQTKEVPWTFGGGTKLEIKRGSGSGSGSGSRLNFGDDIPSALRIAKKKRWNSIEERRIHQESELHSYLSRLIAAERERELEECQRNHEGDEDDSHVRAQQACIEAKHDKYMADMDELFSQVDEKRKKRDIPDYLCGKISFELMREPCITPSGITYDRKDIEEHLQRVGHFDPVTRSPLTQEQLIPNLAMKEVIDAFISENGWVEDYGSGSPAAKRVKLD

SEQ ID NO: 77 - protein, 456 aa, synthetic construct
  source 1..456: note = 3DX.1-(GS)6-CHIP-NLS peptide
MEVKLVESGGDLVKPGGSLKLSCAASGFTFSHYGMSWVRQTPDKRLEWVATIGSRGTYTHYPDSVKGRFTISRDNDKNALYLQMNSLRTEDTAMYYCARKSEFYYYGNTYYYSAMDYWGQGASVTVSSGGGGSGGGDSGGGGSDIVLTQSPASLAVSLGQRATISCRASESVDNYGFSFMNWFQQKPGQPPKLLIYATSNRGSGVPARFSGSGSGTDFSLNIHPVEEDDSAMYFCQQTKEVPWTFGGGTKLEIKRGSGSGSGSGSGSRLNFGDDIPSALRIAKKKRWNSIEERRIHQESELHSYLSRLIAAERERELEECQRNHEGDEDDSHVRAQQACIEAKHDKYMADMDELFSQVDEKRKKRDIPDYLCGKISFELMREPCITPSGITYDRKDIEEHLQRVGHFDPVTRSPLTQEQLIPNLAMKEVIDAFISENGWVEDYGSGSPAAKRVKLD

SEQ ID NO: 78 - protein, 455 aa, synthetic construct
  source 1..455: note = 3DX.1-(GS)1-CHIP-NLS-HA peptide
MEVKLVESGGDLVKPGGSLKLSCAASGFTFSHYGMSWVRQTPDKRLEWVATIGSRGTYTHYPDSVKGRFTISRDNDKNALYLQMNSLRTEDTAMYYCARKSEFYYYGNTYYYSAMDYWGQGASVTVSSGGGGSGGGDSGGGGSDIVLTQSPASLAVSLGQRATISCRASESVDNYGFSFMNWFQQKPGQPPKLLIYATSNRGSGVPARFSGSGSGTDFSLNIHPVEEDDSAMYFCQQTKEVPWTFGGGTKLEIKRGSRLNFGDDIPSALRIAKKKRWNSIEERRIHQESELHSYLSRLIAAERERELEECQRNHEGDEDDSHVRAQQACIEAKHDKYMADMDELFSQVDEKRKKRDIPDYLCGKISFELMREPCITPSGITYDRKDIEEHLQRVGHFDPVTRSPLTQEQLIPNLAMKEVIDAFISENGWVEDYGSGSPAAKRVKLDYPYDVPDYA

SEQ ID NO: 79 - protein, 457 aa, synthetic construct
  source 1..457: note = 3DX.1-(GS)2-CHIP-NLS-HA peptide
MEVKLVESGGDLVKPGGSLKLSCAASGFTFSHYGMSWVRQTPDKRLEWVATIGSRGTYTHYPDSVKGRFTISRDNDKNALYLQMNSLRTEDTAMYYCARKSEFYYYGNTYYYSAMDYWGQGASVTVSSGGGGSGGGDSGGGGSDIVLTQSPASLAVSLGQRATISCRASESVDNYGFSFMNWFQQKPGQPPKLLIYATSNRGSGVPARFSGSGSGTDFSLNIHPVEEDDSAMYFCQQTKEVPWTFGGGTKLEIKRGSGSRLNFGDDIPSALRIAKKKRWNSIEERRIHQESELHSYLSRLIAAERERELEECQRNHEGDEDDSHVRAQQACIEAKHDKYMADMDELFSQVDEKRKKRDIPDYLCGKISFELMREPCITPSGITYDRKDIEEHLQRVGHFDPVTRSPLTQEQLIPNLAMKEVIDAFISENGWVEDYGSGSPAAKRVKLDYPYDVPDYA

SEQ ID NO: 80 - protein, 459 aa, synthetic construct
  source 1..459: note = 3DX.1-(GS)3-CHIP-NLS-HA peptide
MEVKLVESGGDLVKPGGSLKLSCAASGFTFSHYGMSWVRQTPDKRLEWVATIGSRGTYTHYPDSVKGRFTISRDNDKNALYLQMNSLRTEDTAMYYCARKSEFYYYGNTYYYSAMDYWGQGASVTVSSGGGGSGGGDSGGGGSDIVLTQSPASLAVSLGQRATISCRASESVDNYGFSFMNWFQQKPGQPPKLLIYATSNRGSGVPARFSGSGSGTDFSLNIHPVEEDDSAMYFCQQTKEVPWTFGGGTKLEIKRGSGSGSRLNFGDDIPSALRIAKKKRWNSIEERRIHQESELHSYLSRLIAAERERELEECQRNHEGDEDDSHVRAQQACIEAKHDKYMADMDELFSQVDEKRKKRDIPDYLCGKISFELMREPCITPSGITYDRKDIEEHLQRVGHFDPVTRSPLTQEQLIPNLAMKEVIDAFISENGWVEDYGSGSPAAKRVKLDYPYDVPDYA

SEQ ID NO: 81 - protein, 461 aa, synthetic construct
  source 1..461: note = 3DX.1-(GS)4-CHIP-NLS-HA peptide
MEVKLVESGGDLVKPGGSLKLSCAASGFTFSHYGMSWVRQTPDKRLEWVATIGSRGTYTHYPDSVKGRFTISRDNDKNALYLQMNSLRTEDTAMYYCARKSEFYYYGNTYYYSAMDYWGQGASVTVSSGGGGSGGGDSGGGGSDIVLTQSPASLAVSLGQRATISCRASESVDNYGFSFMNWFQQKPGQPPKLLIYATSNRGSGVPARFSGSGSGTDFSLNIHPVEEDDSAMYFCQQTKEVPWTFGGGTKLEIKRGSGSGSGSRLNFGDDIPSALRIAKKKRWNSIEERRIHQESELHSYLSRLIAAERERELEECQRNHEGDEDDSHVRAQQACIEAKHDKYMADMDELFSQVDEKRKKRDIPDYLCGKISFELMREPCITPSGITYDRKDIEEHLQRVGHFDPVTRSPLTQEQLIPNLAMKEVIDAFISENGWVEDYGSGSPAAKRVKLDYPYDVPDYA

SEQ ID NO: 82 - protein, 463 aa, synthetic construct
  source 1..463: note = 3DX.1-(GS)5-CHIP-NLS-HA peptide
MEVKLVESGGDLVKPGGSLKLSCAASGFTFSHYGMSWVRQTPDKRLEWVATIGSRGTYTHYPDSVKGRFTISRDNDKNALYLQMNSLRTEDTAMYYCARKSEFYYYGNTYYYSAMDYWGQGASVTVSSGGGGSGGGDSGGGGSDIVLTQSPASLAVSLGQRATISCRASESVDNYGFSFMNWFQQKPGQPPKLLIYATSNRGSGVPARFSGSGSGTDFSLNIHPVEEDDSAMYFCQQTKEVPWTFGGGTKLEIKRGSGSGSGSGSRLNFGDDIPSALRIAKKKRWNSIEERRIHQESELHSYLSRLIAAERERELEECQRNHEGDEDDSHVRAQQACIEAKHDKYMADMDELFSQVDEKRKKRDIPDYLCGKISFELMREPCITPSGITYDRKDIEEHLQRVGHFDPVTRSPLTQEQLIPNLAMKEVIDAFISENGWVEDYGSGSPAAKRVKLDYPYDVPDYA

SEQ ID NO: 83 - protein, 465 aa, synthetic construct
  source 1..465: note = 3DX.1-(GS)6-CHIP-NLS-HA peptide
MEVKLVESGGDLVKPGGSLKLSCAASGFTFSHYGMSWVRQTPDKRLEWVATIGSRGTYTHYPDSVKGRFTISRDNDKNALYLQMNSLRTEDTAMYYCARKSEFYYYGNTYYYSAMDYWGQGASVTVSSGGGGSGGGDSGGGGSDIVLTQSPASLAVSLGQRATISCRASESVDNYGFSFMNWFQQKPGQPPKLLIYATSNRGSGVPARFSGSGSGTDFSLNIHPVEEDDSAMYFCQQTKEVPWTFGGGTKLEIKRGSGSGSGSGSGSRLNFGDDIPSALRIAKKKRWNSIEERRIHQESELHSYLSRLIAAERERELEECQRNHEGDEDDSHVRAQQACIEAKHDKYMADMDELFSQVDEKRKKRDIPDYLCGKISFELMREPCITPSGITYDRKDIEEHLQRVGHFDPVTRSPLTQEQLIPNLAMKEVIDAFISENGWVEDYGSGSPAAKRVKLDYPYDVPDYA

SEQ ID NO: 84 - protein, 306 aa, synthetic construct
  source 1..306: note = NLS-DCAF1-(GS)1-3DX.1 peptide
PAAKRVKLDGSGSGSQAPINFTSRLNRRASFPKYGGVDGGCFDRHLIFSRGSEVKLVESGGDLVKPGGSLKLSCAASGFTFSHYGMSWVRQTPDKRLEWVATIGSRGTYTHYPDSVKGRFTISRDNDKNALYLQMNSLRTEDTAMYYCARKSEFYYYGNTYYYSAMDYWGQGASVTVSSGGGGSGGGDSGGGGSDIVLTQSPASLAVSLGQRATISCRASESVDNYGFSFMNWFQQKPGQPPKLLIYATSNRGSGVPARFSGSGSGTDFSLNIHPVEEDDSAMYFCQQTKEVPWTFGGGTKLEIKR

SEQ ID NO: 85 - protein, 308 aa, synthetic construct
  source 1..308: note = NLS-DCAF1-(GS)2-3DX.1 peptide
PAAKRVKLDGSGSGSQAPINFTSRLNRRASFPKYGGVDGGCFDRHLIFSRGSGSEVKLVESGGDLVKPGGSLKLSCAASGFTFSHYGMSWVRQTPDKRLEWVATIGSRGTYTHYPDSVKGRFTISRDNDKNALYLQMNSLRTEDTAMYYCARKSEFYYYGNTYYYSAMDYWGQGASVTVSSGGGGSGGGDSGGGGSDIVLTQSPASLAVSLGQRATISCRASESVDNYGFSFMNWFQQKPGQPPKLLIYATSNRGSGVPARFSGSGSGTDFSLNIHPVEEDDSAMYFCQQTKEVPWTFGGGTKLEIKR

SEQ ID NO: 86 - protein, 310 aa, synthetic construct
  source 1..310: note = NLS-DCAF1-(GS)3-3DX.1 peptide
PAAKRVKLDGSGSGSQAPINFTSRLNRRASFPKYGGVDGGCFDRHLIFSRGSGSGSEVKLVESGGDLVKPGGSLKLSCAASGFTFSHYGMSWVRQTPDKRLEWVATIGSRGTYTHYPDSVKGRFTISRDNDKNALYLQMNSLRTEDTAMYYCARKSEFYYYGNTYYYSAMDYWGQGASVTVSSGGGGSGGGDSGGGGSDIVLTQSPASLAVSLGQRATISCRASESVDNYGFSFMNWFQQKPGQPPKLLIYATSNRGSGVPARFSGSGSGTDFSLNIHPVEEDDSAMYFCQQTKEVPWTFGGGTKLEIKR

SEQ ID NO: 87 - protein, 312 aa, synthetic construct
  source 1..312: note = NLS-DCAF1-(GS)4-3DX.1 peptide
PAAKRVKLDGSGSGSQAPINFTSRLNRRASFPKYGGVDGGCFDRHLIFSRGSGSGSGSEVKLVESGGDLVKPGGSLKLSCAASGFTFSHYGMSWVRQTPDKRLEWVATIGSRGTYTHYPDSVKGRFTISRDNDKNALYLQMNSLRTEDTAMYYCARKSEFYYYGNTYYYSAMDYWGQGASVTVSSGGGGSGGGDSGGGGSDIVLTQSPASLAVSLGQRATISCRASESVDNYGFSFMNWFQQKPGQPPKLLIYATSNRGSGVPARFSGSGSGTDFSLNIHPVEEDDSAMYFCQQTKEVPWTFGGGTKLEIKR

SEQ ID NO: 88 - protein, 314 aa, synthetic construct
  source 1..314: note = NLS-DCAF1-(GS)5-3DX.1 peptide
PAAKRVKLDGSGSGSQAPINFTSRLNRRASFPKYGGVDGGCFDRHLIFSRGSGSGSGSGSEVKLVESGGDLVKPGGSLKLSCAASGFTFSHYGMSWVRQTPDKRLEWVATIGSRGTYTHYPDSVKGRFTISRDNDKNALYLQMNSLRTEDTAMYYCARKSEFYYYGNTYYYSAMDYWGQGASVTVSSGGGGSGGGDSGGGGSDIVLTQSPASLAVSLGQRATISCRASESVDNYGFSFMNWFQQKPGQPPKLLIYATSNRGSGVPARFSGSGSGTDFSLNIHPVEEDDSAMYFCQQTKEVPWTFGGGTKLEIKR

SEQ ID NO: 89 - protein, 316 aa, synthetic construct
  source 1..316: note = NLS-DCAF1-(GS)6-3DX.1 peptide
PAAKRVKLDGSGSGSQAPINFTSRLNRRASFPKYGGVDGGCFDRHLIFSRGSGSGSGSGSGSEVKLVESGGDLVKPGGSLKLSCAASGFTFSHYGMSWVRQTPDKRLEWVATIGSRGTYTHYPDSVKGRFTISRDNDKNALYLQMNSLRTEDTAMYYCARKSEFYYYGNTYYYSAMDYWGQGASVTVSSGGGGSGGGDSGGGGSDIVLTQSPASLAVSLGQRATISCRASESVDNYGFSFMNWFQQKPGQPPKLLIYATSNRGSGVPARFSGSGSGTDFSLNIHPVEEDDSAMYFCQQTKEVPWTFGGGTKLEIKR

SEQ ID NO: 90 - protein, 316 aa, synthetic construct
  source 1..316: note = HA-NLS-DCAF1-(GS)1-3DX.1 peptide
MYPYDVPDYAPAAKRVKLDGSGSGSQAPINFTSRLNRRASFPKYGGVDGGCFDRHLIFSRGSEVKLVESGGDLVKPGGSLKLSCAASGFTFSHYGMSWVRQTPDKRLEWVATIGSRGTYTHYPDSVKGRFTISRDNDKNALYLQMNSLRTEDTAMYYCARKSEFYYYGNTYYYSAMDYWGQGASVTVSSGGGGSGGGDSGGGGSDIVLTQSPASLAVSLGQRATISCRASESVDNYGFSFMNWFQQKPGQPPKLLIYATSNRGSGVPARFSGSGSGTDFSLNIHPVEEDDSAMYFCQQTKEVPWTFGGGTKLEIKR

SEQ ID NO: 91 - protein, 318 aa, synthetic construct
  source 1..318: note = HA-NLS-DCAF1-(GS)2-3DX.1 peptide
MYPYDVPDYAPAAKRVKLDGSGSGSQAPINFTSRLNRRASFPKYGGVDGGCFDRHLIFSRGSGSEVKLVESGGDLVKPGGSLKLSCAASGFTFSHYGMSWVRQTPDKRLEWVATIGSRGTYTHYPDSVKGRFTISRDNDKNALYLQMNSLRTEDTAMYYCARKSEFYYYGNTYYYSAMDYWGQGASVTVSSGGGGSGGGDSGGGGSDIVLTQSPASLAVSLGQRATISCRASESVDNYGFSFMNWFQQKPGQPPKLLIYATSNRGSGVPARFSGSGSGTDFSLNIHPVEEDDSAMYFCQQTKEVPWTFGGGTKLEIKR

SEQ ID NO: 92 - protein, 320 aa, synthetic construct
  source 1..320: note = HA-NLS-DCAF1-(GS)3-3DX.1 peptide
MYPYDVPDYAPAAKRVKLDGSGSGSQAPINFTSRLNRRASFPKYGGVDGGCFDRHLIFSRGSGSGSEVKLVESGGDLVKPGGSLKLSCAASGFTFSHYGMSWVRQTPDKRLEWVATIGSRGTYTHYPDSVKGRFTISRDNDKNALYLQMNSLRTEDTAMYYCARKSEFYYYGNTYYYSAMDYWGQGASVTVSSGGGGSGGGDSGGGGSDIVLTQSPASLAVSLGQRATISCRASESVDNYGFSFMNWFQQKPGQPPKLLIYATSNRGSGVPARFSGSGSGTDFSLNIHPVEEDDSAMYFCQQTKEVPWTFGGGTKLEIKR

SEQ ID NO: 93 - protein, 322 aa, synthetic construct
  source 1..322: note = HA-NLS-DCAF1-(GS)4-3DX.1 peptide
MYPYDVPDYAPAAKRVKLDGSGSGSQAPINFTSRLNRRASFPKYGGVDGGCFDRHLIFSRGSGSGSGSEVKLVESGGDLVKPGGSLKLSCAASGFTFSHYGMSWVRQTPDKRLEWVATIGSRGTYTHYPDSVKGRFTISRDNDKNALYLQMNSLRTEDTAMYYCARKSEFYYYGNTYYYSAMDYWGQGASVTVSSGGGGSGGGDSGGGGSDIVLTQSPASLAVSLGQRATISCRASESVDNYGFSFMNWFQQKPGQPPKLLIYATSNRGSGVPARFSGSGSGTDFSLNIHPVEEDDSAMYFCQQTKEVPWTFGGGTKLEIKR

SEQ ID NO: 94 - protein, 324 aa, synthetic construct
  source 1..324: note = HA-NLS-DCAF1-(GS)5-3DX.1 peptide
MYPYDVPDYAPAAKRVKLDGSGSGSQAPINFTSRLNRRASFPKYGGVDGGCFDRHLIFSRGSGSGSGSGSEVKLVESGGDLVKPGGSLKLSCAASGFTFSHYGMSWVRQTPDKRLEWVATIGSRGTYTHYPDSVKGRFTISRDNDKNALYLQMNSLRTEDTAMYYCARKSEFYYYGNTYYYSAMDYWGQGASVTVSSGGGGSGGGDSGGGGSDIVLTQSPASLAVSLGQRATISCRASESVDNYGFSFMNWFQQKPGQPPKLLIYATSNRGSGVPARFSGSGSGTDFSLNIHPVEEDDSAMYFCQQTKEVPWTFGGGTKLEIKR

SEQ ID NO: 95 - protein, 326 aa, synthetic construct
  source 1..326: note = HA-NLS-DCAF1-(GS)6-3DX.1 peptide
MYPYDVPDYAPAAKRVKLDGSGSGSQAPINFTSRLNRRASFPKYGGVDGGCFDRHLIFSRGSGSGSGSGSGSEVKLVESGGDLVKPGGSLKLSCAASGFTFSHYGMSWVRQTPDKRLEWVATIGSRGTYTHYPDSVKGRFTISRDNDKNALYLQMNSLRTEDTAMYYCARKSEFYYYGNTYYYSAMDYWGQGASVTVSSGGGGSGGGDSGGGGSDIVLTQSPASLAVSLGQRATISCRASESVDNYGFSFMNWFQQKPGQPPKLLIYATSNRGSGVPARFSGSGSGTDFSLNIHPVEEDDSAMYFCQQTKEVPWTFGGGTKLEIKR

SEQ ID NO: 96 - protein, 627 aa, synthetic construct
  source 1..627: note = NLS-3DX.1-(GS)1-E6AP peptide
PAAKRVKLDGSGSGSEVKLVESGGDLVKPGGSLKLSCAASGFTFSHYGMSWVRQTPDKRLEWVATIGSRGTYTHYPDSVKGRFTISRDNDKNALYLQMNSLRTEDTAMYYCARKSEFYYYGNTYYYSAMDYWGQGASVTVSSGGGGSGGGDSGGGGSDIVLTQSPASLAVSLGQRATISCRASESVDNYGFSFMNWFQQKPGQPPKLLIYATSNRGSGVPARFSGSGSGTDFSLNIHPVEEDDSAMYFCQQTKEVPWTFGGGTKLEIKRGSNPYLRLKVRRDHIIDDALVRLEMIAMENPADLKKQLYVEFEGEQGVDEGGVSKEFFQLVVEEIFNPDIGMFTYDESTKLFWFNPSSFETEGQFTLIGIVLGLAIYNNCILDVHFPMVVYRKLMGKKGTFRDLGDSHPVLYQSLKDLLEYEGNVEDDMMITFQISQTDLFGNPMMYDLKENGDKIPITNENRKEFVNLYSDYILNKSVEKQFKAFRRGFHMVTNESPLKYLFRPEEIELLICGSRNLDFQALEETTEYDGGYTRDSVLIREFWEIVHSFTDEQKRLFLQFTTGTDRAPVGGLGKLKMIIAKNGPDTERLPTSHTCFNVLLLPEYSSKEKLKERLLKAITYAKGFGML

SEQ ID NO: 97 - protein, 629 aa, synthetic construct
  source 1..629: note = NLS-3DX.1-(GS)2-E6AP peptide
PAAKRVKLDGSGSGSEVKLVESGGDLVKPGGSLKLSCAASGFTFSHYGMSWVRQTPDKRLEWVATIGSRGTYTHYPDSVKGRFTISRDNDKNALYLQMNSLRTEDTAMYYCARKSEFYYYGNTYYYSAMDYWGQGASVTVSSGGGGSGGGDSGGGGSDIVLTQSPASLAVSLGQRATISCRASESVDNYGFSFMNWFQQKPGQPPKLLIYATSNRGSGVPARFSGSGSGTDFSLNIHPVEEDDSAMYFCQQTKEVPWTFGGGTKLEIKRGSGSNPYLRLKVRRDHIIDDALVRLEMIAMENPADLKKQLYVEFEGEQGVDEGGVSKEFFQLVVEEIFNPDIGMFTYDESTKLFWFNPSSFETEGQFTLIGIVLGLAIYNNCILDVHFPMVVYRKLMGKKGTFRDLGDSHPVLYQSLKDLLEYEGNVEDDMMITFQISQTDLFGNPMMYDLKENGDKIPITNENRKEFVNLYSDYILNKSVEKQFKAFRRGFHMVTNESPLKYLFRPEEIELLICGSRNLDFQALEETTEYDGGYTRDSVLIREFWEIVHSFTDEQKRLFLQFTTGTDRAPVGGLGKLKMIIAKNGPDTERLPTSHTCFNVLLLPEYSSKEKLKERLLKAITYAKGFGML

SEQ ID NO: 98 - protein, 631 aa, synthetic construct
  source 1..631: note = NLS-3DX.1-(GS)3-E6AP peptide
PAAKRVKLDGSGSGSEVKLVESGGDLVKPGGSLKLSCAASGFTFSHYGMSWVRQTPDKRLEWVATIGSRGTYTHYPDSVKGRFTISRDNDKNALYLQMNSLRTEDTAMYYCARKSEFYYYGNTYYYSAMDYWGQGASVTVSSGGGGSGGGDSGGGGSDIVLTQSPASLAVSLGQRATISCRASESVDNYGFSFMNWFQQKPGQPPKLLIYATSNRGSGVPARFSGSGSGTDFSLNIHPVEEDDSAMYFCQQTKEVPWTFGGGTKLEIKRGSGSGSNPYLRLKVRRDHIIDDALVRLEMIAMENPADLKKQLYVEFEGEQGVDEGGVSKEFFQLVVEEIFNPDIGMFTYDESTKLFWFNPSSFETEGQFTLIGIVLGLAIYNNCILDVHFPMVVYRKLMGKKGTFRDLGDSHPVLYQSLKDLLEYEGNVEDDMMITFQISQTDLFGNPMMYDLKENGDKIPITNENRKEFVNLYSDYILNKSVEKQFKAFRRGFHMVTNESPLKYLFRPEEIELLICGSRNLDFQALEETTEYDGGYTRDSVLIREFWEIVHSFTDEQKRLFLQFTTGTDRAPVGGLGKLKMIIAKNGPDTERLPTSHTCFNVLLLPEYSSKEKLKERLLKAITYAKGFGML

SEQ ID NO: 99 - protein, 633 aa, synthetic construct
  source 1..633: note = NLS-3DX.1-(GS)4-E6AP peptide
PAAKRVKLDGSGSGSEVKLVESGGDLVKPGGSLKLSCAASGFTFSHYGMSWVRQTPDKRLEWVATIGSRGTYTHYPDSVKGRFTISRDNDKNALYLQMNSLRTEDTAMYYCARKSEFYYYGNTYYYSAMDYWGQGASVTVSSGGGGSGGGDSGGGGSDIVLTQSPASLAVSLGQRATISCRASESVDNYGFSFMNWFQQKPGQPPKLLIYATSNRGSGVPARFSGSGSGTDFSLNIHPVEEDDSAMYFCQQTKEVPWTFGGGTKLEIKRGSGSGSGSNPYLRLKVRRDHIIDDALVRLEMIAMENPADLKKQLYVEFEGEQGVDEGGVSKEFFQLVVEEIFNPDIGMFTYDESTKLFWFNPSSFETEGQFTLIGIVLGLAIYNNCILDVHFPMVVYRKLMGKKGTFRDLGDSHPVLYQSLKDLLEYEGNVEDDMMITFQISQTDLFGNPMMYDLKENGDKIPITNENRKEFVNLYSDYILNKSVEKQFKAFRRGFHMVTNESPLKYLFRPEEIELLICGSRNLDFQALEETTEYDGGYTRDSVLIREFWEIVHSFTDEQKRLFLQFTTGTDRAPVGGLGKLKMIIAKNGPDTERLPTSHTCFNVLLLPEYSSKEKLKERLLKAITYAKGFGML

SEQ ID NO: 100 - protein, 635 aa, synthetic construct
  source 1..635: note = NLS-3DX.1-(GS)5-E6AP peptide
PAAKRVKLDGSGSGSEVKLVESGGDLVKPGGSLKLSCAASGFTFSHYGMSWVRQTPDKRLEWVATIGSRGTYTHYPDSVKGRFTISRDNDKNALYLQMNSLRTEDTAMYYCARKSEFYYYGNTYYYSAMDYWGQGASVTVSSGGGGSGGGDSGGGGSDIVLTQSPASLAVSLGQRATISCRASESVDNYGFSFMNWFQQKPGQPPKLLIYATSNRGSGVPARFSGSGSGTDFSLNIHPVEEDDSAMYFCQQTKEVPWTFGGGTKLEIKRGSGSGSGSGSNPYLRLKVRRDHIIDDALVRLEMIAMENPADLKKQLYVEFEGEQGVDEGGVSKEFFQLVVEEIFNPDIGMFTYDESTKLFWFNPSSFETEGQFTLIGIVLGLAIYNNCILDVHFPMVVYRKLMGKKGTFRDLGDSHPVLYQSLKDLLEYEGNVEDDMMITFQISQTDLFGNPMMYDLKENGDKIPITNENRKEFVNLYSDYILNKSVEKQFKAFRRGFHMVTNESPLKYLFRPEEIELLICGSRNLDFQALEETTEYDGGYTRDSVLIREFWEIVHSFTDEQKRLFLQFTTGTDRAPVGGLGKLKMIIAKNGPDTERLPTSHTCFNVLLLPEYSSKEKLKERLLKAITYAKGFGML

SEQ ID NO: 101 - protein, 637 aa, synthetic construct
  source 1..637: note = NLS-3DX.1-(GS)6-E6AP peptide
PAAKRVKLDGSGSGSEVKLVESGGDLVKPGGSLKLSCAASGFTFSHYGMSWVRQTPDKRLEWVATIGSRGTYTHYPDSVKGRFTISRDNDKNALYLQMNSLRTEDTAMYYCARKSEFYYYGNTYYYSAMDYWGQGASVTVSSGGGGSGGGDSGGGGSDIVLTQSPASLAVSLGQRATISCRASESVDNYGFSFMNWFQQKPGQPPKLLIYATSNRGSGVPARFSGSGSGTDFSLNIHPVEEDDSAMYFCQQTKEVPWTFGGGTKLEIKRGSGSGSGSGSGSNPYLRLKVRRDHIIDDALVRLEMIAMENPADLKKQLYVEFEGEQGVDEGGVSKEFFQLVVEEIFNPDIGMFTYDESTKLFWFNPSSFETEGQFTLIGIVLGLAIYNNCILDVHFPMVVYRKLMGKKGTFRDLGDSHPVLYQSLKDLLEYEGNVEDDMMITFQISQTDLFGNPMMYDLKENGDKIPITNENRKEFVNLYSDYILNKSVEKQFKAFRRGFHMVTNESPLKYLFRPEEIELLICGSRNLDFQALEETTEYDGGYTRDSVLIREFWEIVHSFTDEQKRLFLQFTTGTDRAPVGGLGKLKMIIAKNGPDTERLPTSHTCFNVLLLPEYSSKEKLKERLLKAITYAKGFGML

SEQ ID NO: 102 - protein, 637 aa, synthetic construct
  source 1..637: note = HA-NLS-3DX.1-(GS)1-E6AP peptide
MYPYDVPDYAPAAKRVKLDGSGSGSEVKLVESGGDLVKPGGSLKLSCAASGFTFSHYGMSWVRQTPDKRLEWVATIGSRGTYTHYPDSVKGRFTISRDNDKNALYLQMNSLRTEDTAMYYCARKSEFYYYGNTYYYSAMDYWGQGASVTVSSGGGGSGGGDSGGGGSDIVLTQSPASLAVSLGQRATISCRASESVDNYGFSFMNWFQQKPGQPPKLLIYATSNRGSGVPARFSGSGSGTDFSLNIHPVEEDDSAMYFCQQTKEVPWTFGGGTKLEIKRGSNPYLRLKVRRDHIIDDALVRLEMIAMENPADLKKQLYVEFEGEQGVDEGGVSKEFFQLVVEEIFNPDIGMFTYDESTKLFWFNPSSFETEGQFTLIGIVLGLAIYNNCILDVHFPMVVYRKLMGKKGTFRDLGDSHPVLYQSLKDLLEYEGNVEDDMMITFQISQTDLFGNPMMYDLKENGDKIPITNENRKEFVNLYSDYILNKSVEKQFKAFRRGFHMVTNESPLKYLFRPEEIELLICGSRNLDFQALEETTEYDGGYTRDSVLIREFWEIVHSFTDEQKRLFLQFTTGTDRAPVGGLGKLKMIIAKNGPDTERLPTSHTCFNVLLLPEYSSKEKLKERLLKAITYAKGFGML

SEQ ID NO: 103 - protein, 639 aa, synthetic construct
  source 1..639: note = HA-NLS-3DX.1-(GS)2-E6AP peptide
MYPYDVPDYAPAAKRVKLDGSGSGSEVKLVESGGDLVKPGGSLKLSCAASGFTFSHYGMSWVRQTPDKRLEWVATIGSRGTYTHYPDSVKGRFTISRDNDKNALYLQMNSLRTEDTAMYYCARKSEFYYYGNTYYYSAMDYWGQGASVTVSSGGGGSGGGDSGGGGSDIVLTQSPASLAVSLGQRATISCRASESVDNYGFSFMNWFQQKPGQPPKLLIYATSNRGSGVPARFSGSGSGTDFSLNIHPVEEDDSAMYFCQQTKEVPWTFGGGTKLEIKRGSGSNPYLRLKVRRDHIIDDALVRLEMIAMENPADLKKQLYVEFEGEQGVDEGGVSKEFFQLVVEEIFNPDIGMFTYDESTKLFWFNPSSFETEGQFTLIGIVLGLAIYNNCILDVHFPMVVYRKLMGKKGTFRDLGDSHPVLYQSLKDLLEYEGNVEDDMMITFQISQTDLFGNPMMYDLKENGDKIPITNENRKEFVNLYSDYILNKSVEKQFKAFRRGFHMVTNESPLKYLFRPEEIELLICGSRNLDFQALEETTEYDGGYTRDSVLIREFWEIVHSFTDEQKRLFLQFTTGTDRAPVGGLGKLKMIIAKNGPDTERLPTSHTCFNVLLLPEYSSKEKLKERLLKAITYAKGFGML

SEQ ID NO: 104 - protein, 641 aa, synthetic construct
  source 1..641: note = HA-NLS-3DX.1-(GS)3-E6AP peptide
MYPYDVPDYAPAAKRVKLDGSGSGSEVKLVESGGDLVKPGGSLKLSCAASGFTFSHYGMSWVRQTPDKRLEWVATIGSRGTYTHYPDSVKGRFTISRDNDKNALYLQMNSLRTEDTAMYYCARKSEFYYYGNTYYYSAMDYWGQGASVTVSSGGGGSGGGDSGGGGSDIVLTQSPASLAVSLGQRATISCRASESVDNYGFSFMNWFQQKPGQPPKLLIYATSNRGSGVPARFSGSGSGTDFSLNIHPVEEDDSAMYFCQQTKEVPWTFGGGTKLEIKRGSGSGSNPYLRLKVRRDHIIDDALVRLEMIAMENPADLKKQLYVEFEGEQGVDEGGVSKEFFQLVVEEIFNPDIGMFTYDESTKLFWFNPSSFETEGQFTLIGIVLGLAIYNNCILDVHFPMVVYRKLMGKKGTFRDLGDSHPVLYQSLKDLLEYEGNVEDDMMITFQISQTDLFGNPMMYDLKENGDKIPITNENRKEFVNLYSDYILNKSVEKQFKAFRRGFHMVTNESPLKYLFRPEEIELLICGSRNLDFQALEETTEYDGGYTRDSVLIREFWEIVHSFTDEQKRLFLQFTTGTDRAPVGGLGKLKMIIAKNGPDTERLPTSHTCFNVLLLPEYSSKEKLKERLLKAITYAKGFGML

SEQ ID NO: 105 - protein, 643 aa, synthetic construct
  source 1..643: note = HA-NLS-3DX.1-(GS)4-E6AP peptide
MYPYDVPDYAPAAKRVKLDGSGSGSEVKLVESGGDLVKPGGSLKLSCAASGFTFSHYGMSWVRQTPDKRLEWVATIGSRGTYTHYPDSVKGRFTISRDNDKNALYLQMNSLRTEDTAMYYCARKSEFYYYGNTYYYSAMDYWGQGASVTVSSGGGGSGGGDSGGGGSDIVLTQSPASLAVSLGQRATISCRASESVDNYGFSFMNWFQQKPGQPPKLLIYATSNRGSGVPARFSGSGSGTDFSLNIHPVEEDDSAMYFCQQTKEVPWTFGGGTKLEIKRGSGSGSGSNPYLRLKVRRDHIIDDALVRLEMIAMENPADLKKQLYVEFEGEQGVDEGGVSKEFFQLVVEEIFNPDIGMFTYDESTKLFWFNPSSFETEGQFTLIGIVLGLAIYNNCILDVHFPMVVYRKLMGKKGTFRDLGDSHPVLYQSLKDLLEYEGNVEDDMMITFQISQTDLFGNPMMYDLKENGDKIPITNENRKEFVNLYSDYILNKSVEKQFKAFRRGFHMVTNESPLKYLFRPEEIELLICGSRNLDFQALEETTEYDGGYTRDSVLIREFWEIVHSFTDEQKRLFLQFTTGTDRAPVGGLGKLKMIIAKNGPDTERLPTSHTCFNVLLLPEYSSKEKLKERLLKAITYAKGFGML

SEQ ID NO: 106 - protein, 645 aa, synthetic construct
  source 1..645: note = HA-NLS-3DX.1-(GS)5-E6AP peptide
MYPYDVPDYAPAAKRVKLDGSGSGSEVKLVESGGDLVKPGGSLKLSCAASGFTFSHYGMSWVRQTPDKRLEWVATIGSRGTYTHYPDSVKGRFTISRDNDKNALYLQMNSLRTEDTAMYYCARKSEFYYYGNTYYYSAMDYWGQGASVTVSSGGGGSGGGDSGGGGSDIVLTQSPASLAVSLGQRATISCRASESVDNYGFSFMNWFQQKPGQPPKLLIYATSNRGSGVPARFSGSGSGTDFSLNIHPVEEDDSAMYFCQQTKEVPWTFGGGTKLEIKRGSGSGSGSGSNPYLRLKVRRDHIIDDALVRLEMIAMENPADLKKQLYVEFEGEQGVDEGGVSKEFFQLVVEEIFNPDIGMFTYDESTKLFWFNPSSFETEGQFTLIGIVLGLAIYNNCILDVHFPMVVYRKLMGKKGTFRDLGDSHPVLYQSLKDLLEYEGNVEDDMMITFQISQTDLFGNPMMYDLKENGDKIPITNENRKEFVNLYSDYILNKSVEKQFKAFRRGFHMVTNESPLKYLFRPEEIELLICGSRNLDFQALEETTEYDGGYTRDSVLIREFWEIVHSFTDEQKRLFLQFTTGTDRAPVGGLGKLKMIIAKNGPDTERLPTSHTCFNVLLLPEYSSKEKLKERLLKAITYAKGFGML

SEQ ID NO: 107 - protein, 647 aa, synthetic construct
  source 1..647: note = HA-NLS-3DX.1-(GS)6-E6AP peptide
MYPYDVPDYAPAAKRVKLDGSGSGSEVKLVESGGDLVKPGGSLKLSCAASGFTFSHYGMSWVRQTPDKRLEWVATIGSRGTYTHYPDSVKGRFTISRDNDKNALYLQMNSLRTEDTAMYYCARKSEFYYYGNTYYYSAMDYWGQGASVTVSSGGGGSGGGDSGGGGSDIVLTQSPASLAVSLGQRATISCRASESVDNYGFSFMNWFQQKPGQPPKLLIYATSNRGSGVPARFSGSGSGTDFSLNIHPVEEDDSAMYFCQQTKEVPWTFGGGTKLEIKRGSGSGSGSGSGSNPYLRLKVRRDHIIDDALVRLEMIAMENPADLKKQLYVEFEGEQGVDEGGVSKEFFQLVVEEIFNPDIGMFTYDESTKLFWFNPSSFETEGQFTLIGIVLGLAIYNNCILDVHFPMVVYRKLMGKKGTFRDLGDSHPVLYQSLKDLLEYEGNVEDDMMITFQISQTDLFGNPMMYDLKENGDKIPITNENRKEFVNLYSDYILNKSVEKQFKAFRRGFHMVTNESPLKYLFRPEEIELLICGSRNLDFQALEETTEYDGGYTRDSVLIREFWEIVHSFTDEQKRLFLQFTTGTDRAPVGGLGKLKMIIAKNGPDTERLPTSHTCFNVLLLPEYSSKEKLKERLLKAITYAKGFGML

SEQ ID NO: 108 - protein, 623 aa, synthetic construct
  source 1..623: note = FBXW7a-(GS)1-3DX.1 peptide
NQELLSVGSKRRRTGGSLRGNPSSSQVDEEQMNRVVEEEQQQQLRQQEEEHTARNGEVVGVEPRPGGQNDSQQGQLEENNNRFISVDEDSSGNQEEQEEDEEHAGEQDEEDEEEEEMDQESDDFDQSDDSSREDEHTHTNSVTNSSSIVDLPVHQLSSPFYTKTTKMKRKLDHGSEVRSFSLGKKPCKVSEYTSTTGLVPCSATPTTFGDLRAANGQGQQRRRITSVQPPTGLQEWLKMFQSWSGPEKLLALDELIDSCEPTQVKHMMQVIEPQFQRDFISLLPKELALYVLSFLEPKDLLQAAQTCRYWRILAEDNLLWREKCKEEGIDEPLHIKRRKVIKPGFIHSPWKSAYIRQHRIDTNSRRGGSEVKLVESGGDLVKPGGSLKLSCAASGFTFSHYGMSWVRQTPDKRLEWVATIGSRGTYTHYPDSVKGRFTISRDNDKNALYLQMNSLRTEDTAMYYCARKSEFYYYGNTYYYSAMDYWGQGASVTVSSGGGGSGGGDSGGGGSDIVLTQSPASLAVSLGQRATISCRASESVDNYGFSFMNWFQQKPGQPPKLLIYATSNRGSGVPARFSGSGSGTDFSLNIHPVEEDDSAMYFCQQTKEVPWTFGGGTKLEIKR

SEQ ID NO: 109 - protein, 625 aa, synthetic construct
  source 1..625: note = FBXW7a-(GS)2-3DX.1 peptide
NQELLSVGSKRRRTGGSLRGNPSSSQVDEEQMNRVVEEEQQQQLRQQEEEHTARNGEVVGVEPRPGGQNDSQQGQLEENNNRFISVDEDSSGNQEEQEEDEEHAGEQDEEDEEEEEMDQESDDFDQSDDSSREDEHTHTNSVTNSSSIVDLPVHQLSSPFYTKTTKMKRKLDHGSEVRSFSLGKKPCKVSEYTSTTGLVPCSATPTTFGDLRAANGQGQQRRRITSVQPPTGLQEWLKMFQSWSGPEKLLALDELIDSCEPTQVKHMMQVIEPQFQRDFISLLPKELALYVLSFLEPKDLLQAAQTCRYWRILAEDNLLWREKCKEEGIDEPLHIKRRKVIKPGFIHSPWKSAYIRQHRIDTNSRRGGSGSEVKLVESGGDLVKPGGSLKLSCAASGFTFSHYGMSWVRQTPDKRLEWVATIGSRGTYTHYPDSVKGRFTISRDNDKNALYLQMNSLRTEDTAMYYCARKSEFYYYGNTYYYSAMDYWGQGASVTVSSGGGGSGGGDSGGGGSDIVLTQSPASLAVSLGQRATISCRASESVDNYGFSFMNWFQQKPGQPPKLLIYATSNRGSGVPARFSGSGSGTDFSLNIHPVEEDDSAMYFCQQTKEVPWTFGGGTKLEIKR

SEQ ID NO: 110 - protein, 627 aa, synthetic construct
  source 1..627: note = FBXW7a-(GS)3-3DX.1 peptide
NQELLSVGSKRRRTGGSLRGNPSSSQVDEEQMNRVVEEEQQQQLRQQEEEHTARNGEVVGVEPRPGGQNDSQQGQLEENNNRFISVDEDSSGNQEEQEEDEEHAGEQDEEDEEEEEMDQESDDFDQSDDSSREDEHTHTNSVTNSSSIVDLPVHQLSSPFYTKTTKMKRKLDHGSEVRSFSLGKKPCKVSEYTSTTGLVPCSATPTTFGDLRAANGQGQQRRRITSVQPPTGLQEWLKMFQSWSGPEKLLALDELIDSCEPTQVKHMMQVIEPQFQRDFISLLPKELALYVLSFLEPKDLLQAAQTCRYWRILAEDNLLWREKCKEEGIDEPLHIKRRKVIKPGFIHSPWKSAYIRQHRIDTNSRRGGSGSGSEVKLVESGGDLVKPGGSLKLSCAASGFTFSHYGMSWVRQTPDKRLEWVATIGSRGTYTHYPDSVKGRFTISRDNDKNALYLQMNSLRTEDTAMYYCARKSEFYYYGNTYYYSAMDYWGQGASVTVSSGGGGSGGGDSGGGGSDIVLTQSPASLAVSLGQRATISCRASESVDNYGFSFMNWFQQKPGQPPKLLIYATSNRGSGVPARFSGSGSGTDFSLNIHPVEEDDSAMYFCQQTKEVPWTFGGGTKLEIKR

SEQ ID NO: 111 - protein, 629 aa, synthetic construct
  source 1..629: note = FBXW7a-(GS)4-3DX.1 peptide
NQELLSVGSKRRRTGGSLRGNPSSSQVDEEQMNRVVEEEQQQQLRQQEEEHTARNGEVVGVEPRPGGQNDSQQGQLEENNNRFISVDEDSSGNQEEQEEDEEHAGEQDEEDEEEEEMDQESDDFDQSDDSSREDEHTHTNSVTNSSSIVDLPVHQLSSPFYTKTTKMKRKLDHGSEVRSFSLGKKPCKVSEYTSTTGLVPCSATPTTFGDLRAANGQGQQRRRITSVQPPTGLQEWLKMFQSWSGPEKLLALDELIDSCEPTQVKHMMQVIEPQFQRDFISLLPKELALYVLSFLEPKDLLQAAQTCRYWRILAEDNLLWREKCKEEGIDEPLHIKRRKVIKPGFIHSPWKSAYIRQHRIDTNSRRGGSGSGSGSEVKLVESGGDLVKPGGSLKLSCAASGFTFSHYGMSWVRQTPDKRLEWVATIGSRGTYTHYPDSVKGRFTISRDNDKNALYLQMNSLRTEDTAMYYCARKSEFYYYGNTYYYSAMDYWGQGASVTVSSGGGGSGGGDSGGGGSDIVLTQSPASLAVSLGQRATISCRASESVDNYGFSFMNWFQQKPGQPPKLLIYATSNRGSGVPARFSGSGSGTDFSLNIHPVEEDDSAMYFCQQTKEVPWTFGGGTKLEIKR

SEQ ID NO: 112 - protein, 631 aa, synthetic construct
  source 1..631: note = FBXW7a-(GS)5-3DX.1 peptide
NQELLSVGSKRRRTGGSLRGNPSSSQVDEEQMNRVVEEEQQQQLRQQEEEHTARNGEVVGVEPRPGGQNDSQQGQLEENNNRFISVDEDSSGNQEEQEEDEEHAGEQDEEDEEEEEMDQESDDFDQSDDSSREDEHTHTNSVTNSSSIVDLPVHQLSSPFYTKTTKMKRKLDHGSEVRSFSLGKKPCKVSEYTSTTGLVPCSATPTTFGDLRAANGQGQQRRRITSVQPPTGLQEWLKMFQSWSGPEKLLALDELIDSCEPTQVKHMMQVIEPQFQRDFISLLPKELALYVLSFLEPKDLLQAAQTCRYWRILAEDNLLWREKCKEEGIDEPLHIKRRKVIKPGFIHSPWKSAYIRQHRIDTNSRRGGSGSGSGSGSEVKLVESGGDLVKPGGSLKLSCAASGFTFSHYGMSWVRQTPDKRLEWVATIGSRGTYTHYPDSVKGRFTISRDNDKNALYLQMNSLRTEDTAMYYCARKSEFYYYGNTYYYSAMDYWGQGASVTVSSGGGGSGGGDSGGGGSDIVLTQSPASLAVSLGQRATISCRASESVDNYGFSFMNWFQQKPGQPPKLLIYATSNRGSGVPARFSGSGSGTDFSLNIHPVEEDDSAMYFCQQTKEVPWTFGGGTKLEIKR

SEQ ID NO: 113 - protein, 633 aa, synthetic construct
  source 1..633: note = FBXW7a-(GS)6-3DX.1 peptide
NQELLSVGSKRRRTGGSLRGNPSSSQVDEEQMNRVVEEEQQQQLRQQEEEHTARNGEVVGVEPRPGGQNDSQQGQLEENNNRFISVDEDSSGNQEEQEEDEEHAGEQDEEDEEEEEMDQESDDFDQSDDSSREDEHTHTNSVTNSSSIVDLPVHQLSSPFYTKTTKMKRKLDHGSEVRSFSLGKKPCKVSEYTSTTGLVPCSATPTTFGDLRAANGQGQQRRRITSVQPPTGLQEWLKMFQSWSGPEKLLALDELIDSCEPTQVKHMMQVIEPQFQRDFISLLPKELALYVLSFLEPKDLLQAAQTCRYWRILAEDNLLWREKCKEEGIDEPLHIKRRKVIKPGFIHSPWKSAYIRQHRIDTNSRRGGSGSGSGSGSGSEVKLVESGGDLVKPGGSLKLSCAASGFTFSHYGMSWVRQTPDKRLEWVATIGSRGTYTHYPDSVKGRFTISRDNDKNALYLQMNSLRTEDTAMYYCARKSEFYYYGNTYYYSAMDYWGQGASVTVSSGGGGSGGGDSGGGGSDIVLTQSPASLAVSLGQRATISCRASESVDNYGFSFMNWFQQKPGQPPKLLIYATSNRGSGVPARFSGSGSGTDFSLNIHPVEEDDSAMYFCQQTKEVPWTFGGGTKLEIKR

SEQ ID NO: 114 - protein, 633 aa, synthetic construct
  source 1..633: note = HA-FBXW7a-(GS)1-3DX.1 peptide
MYPYDVPDYANQELLSVGSKRRRTGGSLRGNPSSSQVDEEQMNRVVEEEQQQQLRQQEEEHTARNGEVVGVEPRPGGQNDSQQGQLEENNNRFISVDEDSSGNQEEQEEDEEHAGEQDEEDEEEEEMDQESDDFDQSDDSSREDEHTHTNSVTNSSSIVDLPVHQLSSPFYTKTTKMKRKLDHGSEVRSFSLGKKPCKVSEYTSTTGLVPCSATPTTFGDLRAANGQGQQRRRITSVQPPTGLQEWLKMFQSWSGPEKLLALDELIDSCEPTQVKHMMQVIEPQFQRDFISLLPKELALYVLSFLEPKDLLQAAQTCRYWRILAEDNLLWREKCKEEGIDEPLHIKRRKVIKPGFIHSPWKSAYIRQHRIDTNSRRGGSEVKLVESGGDLVKPGGSLKLSCAASGFTFSHYGMSWVRQTPDKRLEWVATIGSRGTYTHYPDSVKGRFTISRDNDKNALYLQMNSLRTEDTAMYYCARKSEFYYYGNTYYYSAMDYWGQGASVTVSSGGGGSGGGDSGGGGSDIVLTQSPASLAVSLGQRATISCRASESVDNYGFSFMNWFQQKPGQPPKLLIYATSNRGSGVPARFSGSGSGTDFSLNIHPVEEDDSAMYFCQQTKEVPWTFGGGTKLEIKR

SEQ ID NO: 115 - protein, 635 aa, synthetic construct
  source 1..635: note = HA-FBXW7a-(GS)2-3DX.1 peptide
MYPYDVPDYANQELLSVGSKRRRTGGSLRGNPSSSQVDEEQMNRVVEEEQQQQLRQQEEEHTARNGEVVGVEPRPGGQNDSQQGQLEENNNRFISVDEDSSGNQEEQEEDEEHAGEQDEEDEEEEEMDQESDDFDQSDDSSREDEHTHTNSVTNSSSIVDLPVHQLSSPFYTKTTKMKRKLDHGSEVRSFSLGKKPCKVSEYTSTTGLVPCSATPTTFGDLRAANGQGQQRRRITSVQPPTGLQEWLKMFQSWSGPEKLLALDELIDSCEPTQVKHMMQVIEPQFQRDFISLLPKELALYVLSFLEPKDLLQAAQTCRYWRILAEDNLLWREKCKEEGIDEPLHIKRRKVIKPGFIHSPWKSAYIRQHRIDTNSRRGGSGSEVKLVESGGDLVKPGGSLKLSCAASGFTFSHYGMSWVRQTPDKRLEWVATIGSRGTYTHYPDSVKGRFTISRDNDKNALYLQMNSLRTEDTAMYYCARKSEFYYYGNTYYYSAMDYWGQGASVTVSSGGGGSGGGDSGGGGSDIVLTQSPASLAVSLGQRATISCRASESVDNYGFSFMNWFQQKPGQPPKLLIYATSNRGSGVPARFSGSGSGTDFSLNIHPVEEDDSAMYFCQQTKEVPWTFGGGTKLEIKR

SEQ ID NO: 116 - protein, 637 aa, synthetic construct
  source 1..637: note = HA-FBXW7a-(GS)3-3DX.1 peptide
MYPYDVPDYANQELLSVGSKRRRTGGSLRGNPSSSQVDEEQMNRVVEEEQQQQLRQQEEEHTARNGEVVGVEPRPGGQNDSQQGQLEENNNRFISVDEDSSGNQEEQEEDEEHAGEQDEEDEEEEEMDQESDDFDQSDDSSREDEHTHTNSVTNSSSIVDLPVHQLSSPFYTKTTKMKRKLDHGSEVRSFSLGKKPCKVSEYTSTTGLVPCSATPTTFGDLRAANGQGQQRRRITSVQPPTGLQEWLKMFQSWSGPEKLLALDELIDSCEPTQVKHMMQVIEPQFQRDFISLLPKELALYVLSFLEPKDLLQAAQTCRYWRILAEDNLLWREKCKEEGIDEPLHIKRRKVIKPGFIHSPWKSAYIRQHRIDTNSRRGGSGSGSEVKLVESGGDLVKPGGSLKLSCAASGFTFSHYGMSWVRQTPDKRLEWVATIGSRGTYTHYPDSVKGRFTISRDNDKNALYLQMNSLRTEDTAMYYCARKSEFYYYGNTYYYSAMDYWGQGASVTVSSGGGGSGGGDSGGGGSDIVLTQSPASLAVSLGQRATISCRASESVDNYGFSFMNWFQQKPGQPPKLLIYATSNRGSGVPARFSGSGSGTDFSLNIHPVEEDDSAMYFCQQTKEVPWTFGGGTKLEIKR

SEQ ID NO: 117 - protein, 639 aa, synthetic construct
  source 1..639: note = HA-FBXW7a-(GS)4-3DX.1 peptide
MYPYDVPDYANQELLSVGSKRRRTGGSLRGNPSSSQVDEEQMNRVVEEEQQQQLRQQEEEHTARNGEVVGVEPRPGGQNDSQQGQLEENNNRFISVDEDSSGNQEEQEEDEEHAGEQDEEDEEEEEMDQESDDFDQSDDSSREDEHTHTNSVTNSSSIVDLPVHQLSSPFYTKTTKMKRKLDHGSEVRSFSLGKKPCKVSEYTSTTGLVPCSATPTTFGDLRAANGQGQQRRRITSVQPPTGLQEWLKMFQSWSGPEKLLALDELIDSCEPTQVKHMMQVIEPQFQRDFISLLPKELALYVLSFLEPKDLLQAAQTCRYWRILAEDNLLWREKCKEEGIDEPLHIKRRKVIKPGFIHSPWKSAYIRQHRIDTNSRRGGSGSGSGSEVKLVESGGDLVKPGGSLKLSCAASGFTFSHYGMSWVRQTPDKRLEWVATIGSRGTYTHYPDSVKGRFTISRDNDKNALYLQMNSLRTEDTAMYYCARKSEFYYYGNTYYYSAMDYWGQGASVTVSSGGGGSGGGDSGGGGSDIVLTQSPASLAVSLGQRATISCRASESVDNYGFSFMNWFQQKPGQPPKLLIYATSNRGSGVPARFSGSGSGTDFSLNIHPVEEDDSAMYFCQQTKEVPWTFGGGTKLEIKR

SEQ ID NO: 118 - protein, 641 aa, synthetic construct
  source 1..641: note = HA-FBXW7a-(GS)5-3DX.1 peptide
MYPYDVPDYANQELLSVGSKRRRTGGSLRGNPSSSQVDEEQMNRVVEEEQQQQLRQQEEEHTARNGEVVGVEPRPGGQNDSQQGQLEENNNRFISVDEDSSGNQEEQEEDEEHAGEQDEEDEEEEEMDQESDDFDQSDDSSREDEHTHTNSVTNSSSIVDLPVHQLSSPFYTKTTKMKRKLDHGSEVRSFSLGKKPCKVSEYTSTTGLVPCSATPTTFGDLRAANGQGQQRRRITSVQPPTGLQEWLKMFQSWSGPEKLLALDELIDSCEPTQVKHMMQVIEPQFQRDFISLLPKELALYVLSFLEPKDLLQAAQTCRYWRILAEDNLLWREKCKEEGIDEPLHIKRRKVIKPGFIHSPWKSAYIRQHRIDTNSRRGGSGSGSGSGSEVKLVESGGDLVKPGGSLKLSCAASGFTFSHYGMSWVRQTPDKRLEWVATIGSRGTYTHYPDSVKGRFTISRDNDKNALYLQMNSLRTEDTAMYYCARKSEFYYYGNTYYYSAMDYWGQGASVTVSSGGGGSGGGDSGGGGSDIVLTQSPASLAVSLGQRATISCRASESVDNYGFSFMNWFQQKPGQPPKLLIYATSNRGSGVPARFSGSGSGTDFSLNIHPVEEDDSAMYFCQQTKEVPWTFGGGTKLEIKR

SEQ ID NO: 119 - protein, 643 aa, synthetic construct
  source 1..643: note = HA-FBXW7a-(GS)6-3DX.1 peptide
MYPYDVPDYANQELLSVGSKRRRTGGSLRGNPSSSQVDEEQMNRVVEEEQQQQLRQQEEEHTARNGEVVGVEPRPGGQNDSQQGQLEENNNRFISVDEDSSGNQEEQEEDEEHAGEQDEEDEEEEEMDQESDDFDQSDDSSREDEHTHTNSVTNSSSIVDLPVHQLSSPFYTKTTKMKRKLDHGSEVRSFSLGKKPCKVSEYTSTTGLVPCSATPTTFGDLRAANGQGQQRRRITSVQPPTGLQEWLKMFQSWSGPEKLLALDELIDSCEPTQVKHMMQVIEPQFQRDFISLLPKELALYVLSFLEPKDLLQAAQTCRYWRILAEDNLLWREKCKEEGIDEPLHIKRRKVIKPGFIHSPWKSAYIRQHRIDTNSRRGGSGSGSGSGSGSEVKLVESGGDLVKPGGSLKLSCAASGFTFSHYGMSWVRQTPDKRLEWVATIGSRGTYTHYPDSVKGRFTISRDNDKNALYLQMNSLRTEDTAMYYCARKSEFYYYGNTYYYSAMDYWGQGASVTVSSGGGGSGGGDSGGGGSDIVLTQSPASLAVSLGQRATISCRASESVDNYGFSFMNWFQQKPGQPPKLLIYATSNRGSGVPARFSGSGSGTDFSLNIHPVEEDDSAMYFCQQTKEVPWTFGGGTKLEIKR

SEQ ID NO: 120 - protein, 592 aa, synthetic construct
  source 1..592: note = NLS-Keap1-(GS)1-3DX.1 peptide
PAAKRVKLDGSGSGSQPDPRPSGAGACCRFLPLQSQCPEGAGDAVMYASTECKAEVTPSQHGNRTFSYTLEDHTKQAFGIMNELRLSQQLCDVTLQVKYQDAPAAQFMAHKVVLASSSPVFKAMFTNGLREQGMEVVSIEGIHPKVMERLIEFAYTASISMGEKCVLHVMNGAVMYQIDSVVRACSDFLVQQLDPSNAIGIANFAEQIGCVELHQRAREYIYMHFGEVAKQEEFFNLSHCQLVTLISRDDLNVRCESEVFHACINWVKYDCEQRRFYVQALLRAVRCHSLTPNFLQMQLQKCEILQSDSRCKDYLVKIFEELTLHKPTQVMPCRAPGSEVKLVESGGDLVKPGGSLKLSCAASGFTFSHYGMSWVRQTPDKRLEWVATIGSRGTYTHYPDSVKGRFTISRDNDKNALYLQMNSLRTEDTAMYYCARKSEFYYYGNTYYYSAMDYWGQGASVTVSSGGGGSGGGDSGGGGSDIVLTQSPASLAVSLGQRATISCRASESVDNYGFSFMNWFQQKPGQPPKLLIYATSNRGSGVPARFSGSGSGTDFSLNIHPVEEDDSAMYFCQQTKEVPWTFGGGTKLEIKR

SEQ ID NO: 121 - protein, 594 aa, synthetic construct
  source 1..594: note = NLS-Keap1-(GS)2-3DX.1 peptide
PAAKRVKLDGSGSGSQPDPRPSGAGACCRFLPLQSQCPEGAGDAVMYASTECKAEVTPSQHGNRTFSYTLEDHTKQAFGIMNELRLSQQLCDVTLQVKYQDAPAAQFMAHKVVLASSSPVFKAMFTNGLREQGMEVVSIEGIHPKVMERLIEFAYTASISMGEKCVLHVMNGAVMYQIDSVVRACSDFLVQQLDPSNAIGIANFAEQIGCVELHQRAREYIYMHFGEVAKQEEFFNLSHCQLVTLISRDDLNVRCESEVFHACINWVKYDCEQRRFYVQALLRAVRCHSLTPNFLQMQLQKCEILQSDSRCKDYLVKIFEELTLHKPTQVMPCRAPGSGSEVKLVESGGDLVKPGGSLKLSCAASGFTFSHYGMSWVRQTPDKRLEWVATIGSRGTYTHYPDSVKGRFTISRDNDKNALYLQMNSLRTEDTAMYYCARKSEFYYYGNTYYYSAMDYWGQGASVTVSSGGGGSGGGDSGGGGSDIVLTQSPASLAVSLGQRATISCRASESVDNYGFSFMNWFQQKPGQPPKLLIYATSNRGSGVPARFSGSGSGTDFSLNIHPVEEDDSAMYFCQQTKEVPWTFGGGTKLEIKR

SEQ ID NO: 122 - protein, 596 aa, synthetic construct
  source 1..596: note = NLS-Keap1-(GS)3-3DX.1 peptide
PAAKRVKLDGSGSGSQPDPRPSGAGACCRFLPLQSQCPEGAGDAVMYASTECKAEVTPSQHGNRTFSYTLEDHTKQAFGIMNELRLSQQLCDVTLQVKYQDAPAAQFMAHKVVLASSSPVFKAMFTNGLREQGMEVVSIEGIHPKVMERLIEFAYTASISMGEKCVLHVMNGAVMYQIDSVVRACSDFLVQQLDPSNAIGIANFAEQIGCVELHQRAREYIYMHFGEVAKQEEFFNLSHCQLVTLISRDDLNVRCESEVFHACINWVKYDCEQRRFYVQALLRAVRCHSLTPNFLQMQLQKCEILQSDSRCKDYLVKIFEELTLHKPTQVMPCRAPGSGSGSEVKLVESGGDLVKPGGSLKLSCAASGFTFSHYGMSWVRQTPDKRLEWVATIGSRGTYTHYPDSVKGRFTISRDNDKNALYLQMNSLRTEDTAMYYCARKSEFYYYGNTYYYSAMDYWGQGASVTVSSGGGGSGGGDSGGGGSDIVLTQSPASLAVSLGQRATISCRASESVDNYGFSFMNWFQQKPGQPPKLLIYATSNRGSGVPARFSGSGSGTDFSLNIHPVEEDDSAMYFCQQTKEVPWTFGGGTKLEIKR

SEQ ID NO: 123 - protein, 598 aa, synthetic construct
  source 1..598: note = NLS-Keap1-(GS)4-3DX.1 peptide
PAAKRVKLDGSGSGSQPDPRPSGAGACCRFLPLQSQCPEGAGDAVMYASTECKAEVTPSQHGNRTFSYTLEDHTKQAFGIMNELRLSQQLCDVTLQVKYQDAPAAQFMAHKVVLASSSPVFKAMFTNGLREQGMEVVSIEGIHPKVMERLIEFAYTASISMGEKCVLHVMNGAVMYQIDSVVRACSDFLVQQLDPSNAIGIANFAEQIGCVELHQRAREYIYMHFGEVAKQEEFFNLSHCQLVTLISRDDLNVRCESEVFHACINWVKYDCEQRRFYVQALLRAVRCHSLTPNFLQMQLQKCEILQSDSRCKDYLVKIFEELTLHKPTQVMPCRAPGSGSGSGSEVKLVESGGDLVKPGGSLKLSCAASGFTFSHYGMSWVRQTPDKRLEWVATIGSRGTYTHYPDSVKGRFTISRDNDKNALYLQMNSLRTEDTAMYYCARKSEFYYYGNTYYYSAMDYWGQGASVTVSSGGGGSGGGDSGGGGSDIVLTQSPASLAVSLGQRATISCRASESVDNYGFSFMNWFQQKPGQPPKLLIYATSNRGSGVPARFSGSGSGTDFSLNIHPVEEDDSAMYFCQQTKEVPWTFGGGTKLEIKR

SEQ ID NO: 124 - protein, 600 aa, synthetic construct
  source 1..600: note = NLS-Keap1-(GS)5-3DX.1 peptide
PAAKRVKLDGSGSGSQPDPRPSGAGACCRFLPLQSQCPEGAGDAVMYASTECKAEVTPSQHGNRTFSYTLEDHTKQAFGIMNELRLSQQLCDVTLQVKYQDAPAAQFMAHKVVLASSSPVFKAMFTNGLREQGMEVVSIEGIHPKVMERLIEFAYTASISMGEKCVLHVMNGAVMYQIDSVVRACSDFLVQQLDPSNAIGIANFAEQIGCVELHQRAREYIYMHFGEVAKQEEFFNLSHCQLVTLISRDDLNVRCESEVFHACINWVKYDCEQRRFYVQALLRAVRCHSLTPNFLQMQLQKCEILQSDSRCKDYLVKIFEELTLHKPTQVMPCRAPGSGSGSGSGSEVKLVESGGDLVKPGGSLKLSCAASGFTFSHYGMSWVRQTPDKRLEWVATIGSRGTYTHYPDSVKGRFTISRDNDKNALYLQMNSLRTEDTAMYYCARKSEFYYYGNTYYYSAMDYWGQGASVTVSSGGGGSGGGDSGGGGSDIVLTQSPASLAVSLGQRATISCRASESVDNYGFSFMNWFQQKPGQPPKLLIYATSNRGSGVPARFSGSGSGTDFSLNIHPVEEDDSAMYFCQQTKEVPWTFGGGTKLEIKR

SEQ ID NO: 125 - protein, 602 aa, synthetic construct
  source 1..602: note = NLS-Keap1-(GS)6-3DX.1 peptide
PAAKRVKLDGSGSGSQPDPRPSGAGACCRFLPLQSQCPEGAGDAVMYASTECKAEVTPSQHGNRTFSYTLEDHTKQAFGIMNELRLSQQLCDVTLQVKYQDAPAAQFMAHKVVLASSSPVFKAMFTNGLREQGMEVVSIEGIHPKVMERLIEFAYTASISMGEKCVLHVMNGAVMYQIDSVVRACSDFLVQQLDPSNAIGIANFAEQIGCVELHQRAREYIYMHFGEVAKQEEFFNLSHCQLVTLISRDDLNVRCESEVFHACINWVKYDCEQRRFYVQALLRAVRCHSLTPNFLQMQLQKCEILQSDSRCKDYLVKIFEELTLHKPTQVMPCRAPGSGSGSGSGSGSEVKLVESGGDLVKPGGSLKLSCAASGFTFSHYGMSWVRQTPDKRLEWVATIGSRGTYTHYPDSVKGRFTISRDNDKNALYLQMNSLRTEDTAMYYCARKSEFYYYGNTYYYSAMDYWGQGASVTVSSGGGGSGGGDSGGGGSDIVLTQSPASLAVSLGQRATISCRASESVDNYGFSFMNWFQQKPGQPPKLLIYATSNRGSGVPARFSGSGSGTDFSLNIHPVEEDDSAMYFCQQTKEVPWTFGGGTKLEIKR

SEQ ID NO: 126 - protein, 602 aa, synthetic construct
  source 1..602: note = HA-NLS-Keap1-(GS)1-3DX.1 peptide
MYPYDVPDYAPAAKRVKLDGSGSGSQPDPRPSGAGACCRFLPLQSQCPEGAGDAVMYASTECKAEVTPSQHGNRTFSYTLEDHTKQAFGIMNELRLSQQLCDVTLQVKYQDAPAAQFMAHKVVLASSSPVFKAMFTNGLREQGMEVVSIEGIHPKVMERLIEFAYTASISMGEKCVLHVMNGAVMYQIDSVVRACSDFLVQQLDPSNAIGIANFAEQIGCVELHQRAREYIYMHFGEVAKQEEFFNLSHCQLVTLISRDDLNVRCESEVFHACINWVKYDCEQRRFYVQALLRAVRCHSLTPNFLQMQLQKCEILQSDSRCKDYLVKIFEELTLHKPTQVMPCRAPGSEVKLVESGGDLVKPGGSLKLSCAASGFTFSHYGMSWVRQTPDKRLEWVATIGSRGTYTHYPDSVKGRFTISRDNDKNALYLQMNSLRTEDTAMYYCARKSEFYYYGNTYYYSAMDYWGQGASVTVSSGGGGSGGGDSGGGGSDIVLTQSPASLAVSLGQRATISCRASESVDNYGFSFMNWFQQKPGQPPKLLIYATSNRGSGVPARFSGSGSGTDFSLNIHPVEEDDSAMYFCQQTKEVPWTFGGGTKLEIKR

SEQ ID NO: 127 - protein, 604 aa, synthetic construct
  source 1..604: note = HA-NLS-Keap1-(GS)2-3DX.1 peptide
MYPYDVPDYAPAAKRVKLDGSGSGSQPDPRPSGAGACCRFLPLQSQCPEGAGDAVMYASTECKAEVTPSQHGNRTFSYTLEDHTKQAFGIMNELRLSQQLCDVTLQVKYQDAPAAQFMAHKVVLASSSPVFKAMFTNGLREQGMEVVSIEGIHPKVMERLIEFAYTASISMGEKCVLHVMNGAVMYQIDSVVRACSDFLVQQLDPSNAIGIANFAEQIGCVELHQRAREYIYMHFGEVAKQEEFFNLSHCQLVTLISRDDLNVRCESEVFHACINWVKYDCEQRRFYVQALLRAVRCHSLTPNFLQMQLQKCEILQSDSRCKDYLVKIFEELTLHKPTQVMPCRAPGSGSEVKLVESGGDLVKPGGSLKLSCAASGFTFSHYGMSWVRQTPDKRLEWVATIGSRGTYTHYPDSVKGRFTISRDNDKNALYLQMNSLRTEDTAMYYCARKSEFYYYGNTYYYSAMDYWGQGASVTVSSGGGGSGGGDSGGGGSDIVLTQSPASLAVSLGQRATISCRASESVDNYGFSFMNWFQQKPGQPPKLLIYATSNRGSGVPARFSGSGSGTDFSLNIHPVEEDDSAMYFCQQTKEVPWTFGGGTKLEIKR

SEQ ID NO: 128 - protein, 606 aa, synthetic construct
  source 1..606: note = HA-NLS-Keap1-(GS)3-3DX.1 peptide
MYPYDVPDYAPAAKRVKLDGSGSGSQPDPRPSGAGACCRFLPLQSQCPEGAGDAVMYASTECKAEVTPSQHGNRTFSYTLEDHTKQAFGIMNELRLSQQLCDVTLQVKYQDAPAAQFMAHKVVLASSSPVFKAMFTNGLREQGMEVVSIEGIHPKVMERLIEFAYTASISMGEKCVLHVMNGAVMYQIDSVVRACSDFLVQQLDPSNAIGIANFAEQIGCVELHQRAREYIYMHFGEVAKQEEFFNLSHCQLVTLISRDDLNVRCESEVFHACINWVKYDCEQRRFYVQALLRAVRCHSLTPNFLQMQLQKCEILQSDSRCKDYLVKIFEELTLHKPTQVMPCRAPGSGSGSEVKLVESGGDLVKPGGSLKLSCAASGFTFSHYGMSWVRQTPDKRLEWVATIGSRGTYTHYPDSVKGRFTISRDNDKNALYLQMNSLRTEDTAMYYCARKSEFYYYGNTYYYSAMDYWGQGASVTVSSGGGGSGGGDSGGGGSDIVLTQSPASLAVSLGQRATISCRASESVDNYGFSFMNWFQQKPGQPPKLLIYATSNRGSGVPARFSGSGSGTDFSLNIHPVEEDDSAMYFCQQTKEVPWTFGGGTKLEIKR

SEQ ID NO: 129 - protein, 608 aa, synthetic construct
  source 1..608: note = HA-NLS-Keap1-(GS)4-3DX.1 peptide
MYPYDVPDYAPAAKRVKLDGSGSGSQPDPRPSGAGACCRFLPLQSQCPEGAGDAVMYASTECKAEVTPSQHGNRTFSYTLEDHTKQAFGIMNELRLSQQLCDVTLQVKYQDAPAAQFMAHKVVLASSSPVFKAMFTNGLREQGMEVVSIEGIHPKVMERLIEFAYTASISMGEKCVLHVMNGAVMYQIDSVVRACSDFLVQQLDPSNAIGIANFAEQIGCVELHQRAREYIYMHFGEVAKQEEFFNLSHCQLVTLISRDDLNVRCESEVFHACINWVKYDCEQRRFYVQALLRAVRCHSLTPNFLQMQLQKCEILQSDSRCKDYLVKIFEELTLHKPTQVMPCRAPGSGSGSGSEVKLVESGGDLVKPGGSLKLSCAASGFTFSHYGMSWVRQTPDKRLEWVATIGSRGTYTHYPDSVKGRFTISRDNDKNALYLQMNSLRTEDTAMYYCARKSEFYYYGNTYYYSAMDYWGQGASVTVSSGGGGSGGGDSGGGGSDIVLTQSPASLAVSLGQRATISCRASESVDNYGFSFMNWFQQKPGQPPKLLIYATSNRGSGVPARFSGSGSGTDFSLNIHPVEEDDSAMYFCQQTKEVPWTFGGGTKLEIKR

SEQ ID NO: 130 - protein, 610 aa, synthetic construct
  source 1..610: note = HA-NLS-Keap1-(GS)5-3DX.1 peptide
MYPYDVPDYAPAAKRVKLDGSGSGSQPDPRPSGAGACCRFLPLQSQCPEGAGDAVMYASTECKAEVTPSQHGNRTFSYTLEDHTKQAFGIMNELRLSQQLCDVTLQVKYQDAPAAQFMAHKVVLASSSPVFKAMFTNGLREQGMEVVSIEGIHPKVMERLIEFAYTASISMGEKCVLHVMNGAVMYQIDSVVRACSDFLVQQLDPSNAIGIANFAEQIGCVELHQRAREYIYMHFGEVAKQEEFFNLSHCQLVTLISRDDLNVRCESEVFHACINWVKYDCEQRRFYVQALLRAVRCHSLTPNFLQMQLQKCEILQSDSRCKDYLVKIFEELTLHKPTQVMPCRAPGSGSGSGSGSEVKLVESGGDLVKPGGSLKLSCAASGFTFSHYGMSWVRQTPDKRLEWVATIGSRGTYTHYPDSVKGRFTISRDNDKNALYLQMNSLRTEDTAMYYCARKSEFYYYGNTYYYSAMDYWGQGASVTVSSGGGGSGGGDSGGGGSDIVLTQSPASLAVSLGQRATISCRASESVDNYGFSFMNWFQQKPGQPPKLLIYATSNRGSGVPARFSGSGSGTDFSLNIHPVEEDDSAMYFCQQTKEVPWTFGGGTKLEIKR

SEQ ID NO: 131 - protein, 612 aa, synthetic construct
  source 1..612: note = HA-NLS-Keap1-(GS)6-3DX.1 peptide
MYPYDVPDYAPAAKRVKLDGSGSGSQPDPRPSGAGACCRFLPLQSQCPEGAGDAVMYASTECKAEVTPSQHGNRTFSYTLEDHTKQAFGIMNELRLSQQLCDVTLQVKYQDAPAAQFMAHKVVLASSSPVFKAMFTNGLREQGMEVVSIEGIHPKVMERLIEFAYTASISMGEKCVLHVMNGAVMYQIDSVVRACSDFLVQQLDPSNAIGIANFAEQIGCVELHQRAREYIYMHFGEVAKQEEFFNLSHCQLVTLISRDDLNVRCESEVFHACINWVKYDCEQRRFYVQALLRAVRCHSLTPNFLQMQLQKCEILQSDSRCKDYLVKIFEELTLHKPTQVMPCRAPGSGSGSGSGSGSEVKLVESGGDLVKPGGSLKLSCAASGFTFSHYGMSWVRQTPDKRLEWVATIGSRGTYTHYPDSVKGRFTISRDNDKNALYLQMNSLRTEDTAMYYCARKSEFYYYGNTYYYSAMDYWGQGASVTVSSGGGGSGGGDSGGGGSDIVLTQSPASLAVSLGQRATISCRASESVDNYGFSFMNWFQQKPGQPPKLLIYATSNRGSGVPARFSGSGSGTDFSLNIHPVEEDDSAMYFCQQTKEVPWTFGGGTKLEIKR

SEQ ID NO: 132 - protein, 398 aa, synthetic construct
  source 1..398: note = NLS-RNF125-(GS)1-3DX.1 peptide
PAAKRVKLDGSGSGSGSVLSTDSGKSAPASATARALERRRDPELPVTSFDCAVCLEVLHQPVRTRCGHVFCRSCIATSLKNNKWTCPYCRAYLPSEGVPATDVAKRMKSEYKNCAECDTLVCLSEMRAHIRTCQKYIDKYGPGSEVKLVESGGDLVKPGGSLKLSCAASGFTFSHYGMSWVRQTPDKRLEWVATIGSRGTYTHYPDSVKGRFTISRDNDKNALYLQMNSLRTEDTAMYYCARKSEFYYYGNTYYYSAMDYWGQGASVTVSSGGGGSGGGDSGGGGSDIVLTQSPASLAVSLGQRATISCRASESVDNYGFSFMNWFQQKPGQPPKLLIYATSNRGSGVPARFSGSGSGTDFSLNIHPVEEDDSAMYFCQQTKEVPWTFGGGTKLEIKR

SEQ ID NO: 133 - protein, 400 aa, synthetic construct
  source 1..400: note = NLS-RNF125-(GS)2-3DX.1 peptide
PAAKRVKLDGSGSGSGSVLSTDSGKSAPASATARALERRRDPELPVTSFDCAVCLEVLHQPVRTRCGHVFCRSCIATSLKNNKWTCPYCRAYLPSEGVPATDVAKRMKSEYKNCAECDTLVCLSEMRAHIRTCQKYIDKYGPGSGSEVKLVESGGDLVKPGGSLKLSCAASGFTFSHYGMSWVRQTPDKRLEWVATIGSRGTYTHYPDSVKGRFTISRDNDKNALYLQMNSLRTEDTAMYYCARKSEFYYYGNTYYYSAMDYWGQGASVTVSSGGGGSGGGDSGGGGSDIVLTQSPASLAVSLGQRATISCRASESVDNYGFSFMNWFQQKPGQPPKLLIYATSNRGSGVPARFSGSGSGTDFSLNIHPVEEDDSAMYFCQQTKEVPWTFGGGTKLEIKR

SEQ ID NO: 134 - protein, 402 aa, synthetic construct
  source 1..402: note = NLS-RNF125-(GS)3-3DX.1 peptide
PAAKRVKLDGSGSGSGSVLSTDSGKSAPASATARALERRRDPELPVTSFDCAVCLEVLHQPVRTRCGHVFCRSCIATSLKNNKWTCPYCRAYLPSEGVPATDVAKRMKSEYKNCAECDTLVCLSEMRAHIRTCQKYIDKYGPGSGSGSEVKLVESGGDLVKPGGSLKLSCAASGFTFSHYGMSWVRQTPDKRLEWVATIGSRGTYTHYPDSVKGRFTISRDNDKNALYLQMNSLRTEDTAMYYCARKSEFYYYGNTYYYSAMDYWGQGASVTVSSGGGGSGGGDSGGGGSDIVLTQSPASLAVSLGQRATISCRASESVDNYGFSFMNWFQQKPGQPPKLLIYATSNRGSGVPARFSGSGSGTDFSLNIHPVEEDDSAMYFCQQTKEVPWTFGGGTKLEIKR

SEQ ID NO: 135 - protein, 404 aa, synthetic construct
  source 1..404: note = NLS-RNF125-(GS)4-3DX.1 peptide
PAAKRVKLDGSGSGSGSVLSTDSGKSAPASATARALERRRDPELPVTSFDCAVCLEVLHQPVRTRCGHVFCRSCIATSLKNNKWTCPYCRAYLPSEGVPATDVAKRMKSEYKNCAECDTLVCLSEMRAHIRTCQKYIDKYGPGSGSGSGSEVKLVESGGDLVKPGGSLKLSCAASGFTFSHYGMSWVRQTPDKRLEWVATIGSRGTYTHYPDSVKGRFTISRDNDKNALYLQMNSLRTEDTAMYYCARKSEFYYYGNTYYYSAMDYWGQGASVTVSSGGGGSGGGDSGGGGSDIVLTQSPASLAVSLGQRATISCRASESVDNYGFSFMNWFQQKPGQPPKLLIYATSNRGSGVPARFSGSGSGTDFSLNIHPVEEDDSAMYFCQQTKEVPWTFGGGTKLEIKR

SEQ ID NO: 136 - protein, 406 aa, synthetic construct
  source 1..406: note = NLS-RNF125-(GS)5-3DX.1 peptide
PAAKRVKLDGSGSGSGSVLSTDSGKSAPASATARALERRRDPELPVTSFDCAVCLEVLHQPVRTRCGHVFCRSCIATSLKNNKWTCPYCRAYLPSEGVPATDVAKRMKSEYKNCAECDTLVCLSEMRAHIRTCQKYIDKYGPGSGSGSGSGSEVKLVESGGDLVKPGGSLKLSCAASGFTFSHYGMSWVRQTPDKRLEWVATIGSRGTYTHYPDSVKGRFTISRDNDKNALYLQMNSLRTEDTAMYYCARKSEFYYYGNTYYYSAMDYWGQGASVTVSSGGGGSGGGDSGGGGSDIVLTQSPASLAVSLGQRATISCRASESVDNYGFSFMNWFQQKPGQPPKLLIYATSNRGSGVPARFSGSGSGTDFSLNIHPVEEDDSAMYFCQQTKEVPWTFGGGTKLEIKR

SEQ ID NO: 137 - protein, 408 aa, synthetic construct
  source 1..408: note = NLS-RNF125-(GS)6-3DX.1 peptide
PAAKRVKLDGSGSGSGSVLSTDSGKSAPASATARALERRRDPELPVTSFDCAVCLEVLHQPVRTRCGHVFCRSCIATSLKNNKWTCPYCRAYLPSEGVPATDVAKRMKSEYKNCAECDTLVCLSEMRAHIRTCQKYIDKYGPGSGSGSGSGSGSEVKLVESGGDLVKPGGSLKLSCAASGFTFSHYGMSWVRQTPDKRLEWVATIGSRGTYTHYPDSVKGRFTISRDNDKNALYLQMNSLRTEDTAMYYCARKSEFYYYGNTYYYSAMDYWGQGASVTVSSGGGGSGGGDSGGGGSDIVLTQSPASLAVSLGQRATISCRASESVDNYGFSFMNWFQQKPGQPPKLLIYATSNRGSGVPARFSGSGSGTDFSLNIHPVEEDDSAMYFCQQTKEVPWTFGGGTKLEIKR

SEQ ID NO: 138 - protein, 408 aa, synthetic construct
  source 1..408: note = HA-NLS-RNF125-(GS)1-3DX.1 peptide
MYPYDVPDYAPAAKRVKLDGSGSGSGSVLSTDSGKSAPASATARALERRRDPELPVTSFDCAVCLEVLHQPVRTRCGHVFCRSCIATSLKNNKWTCPYCRAYLPSEGVPATDVAKRMKSEYKNCAECDTLVCLSEMRAHIRTCQKYIDKYGPGSEVKLVESGGDLVKPGGSLKLSCAASGFTFSHYGMSWVRQTPDKRLEWVATIGSRGTYTHYPDSVKGRFTISRDNDKNALYLQMNSLRTEDTAMYYCARKSEFYYYGNTYYYSAMDYWGQGASVTVSSGGGGSGGGDSGGGGSDIVLTQSPASLAVSLGQRATISCRASESVDNYGFSFMNWFQQKPGQPPKLLIYATSNRGSGVPARFSGSGSGTDFSLNIHPVEEDDSAMYFCQQTKEVPWTFGGGTKLEIKR

SEQ ID NO: 139 - protein, 410 aa, synthetic construct
  source 1..410: note = HA-NLS-RNF125-(GS)2-3DX.1 peptide
MYPYDVPDYAPAAKRVKLDGSGSGSGSVLSTDSGKSAPASATARALERRRDPELPVTSFDCAVCLEVLHQPVRTRCGHVFCRSCIATSLKNNKWTCPYCRAYLPSEGVPATDVAKRMKSEYKNCAECDTLVCLSEMRAHIRTCQKYIDKYGPGSGSEVKLVESGGDLVKPGGSLKLSCAASGFTFSHYGMSWVRQTPDKRLEWVATIGSRGTYTHYPDSVKGRFTISRDNDKNALYLQMNSLRTEDTAMYYCARKSEFYYYGNTYYYSAMDYWGQGASVTVSSGGGGSGGGDSGGGGSDIVLTQSPASLAVSLGQRATISCRASESVDNYGFSFMNWFQQKPGQPPKLLIYATSNRGSGVPARFSGSGSGTDFSLNIHPVEEDDSAMYFCQQTKEVPWTFGGGTKLEIKR

SEQ ID NO: 140 - protein, 412 aa, synthetic construct
  source 1..412: note = HA-NLS-RNF125-(GS)3-3DX.1 peptide
MYPYDVPDYAPAAKRVKLDGSGSGSGSVLSTDSGKSAPASATARALERRRDPELPVTSFDCAVCLEVLHQPVRTRCGHVFCRSCIATSLKNNKWTCPYCRAYLPSEGVPATDVAKRMKSEYKNCAECDTLVCLSEMRAHIRTCQKYIDKYGPGSGSGSEVKLVESGGDLVKPGGSLKLSCAASGFTFSHYGMSWVRQTPDKRLEWVATIGSRGTYTHYPDSVKGRFTISRDNDKNALYLQMNSLRTEDTAMYYCARKSEFYYYGNTYYYSAMDYWGQGASVTVSSGGGGSGGGDSGGGGSDIVLTQSPASLAVSLGQRATISCRASESVDNYGFSFMNWFQQKPGQPPKLLIYATSNRGSGVPARFSGSGSGTDFSLNIHPVEEDDSAMYFCQQTKEVPWTFGGGTKLEIKR

SEQ ID NO: 141 - protein, 414 aa, synthetic construct
  source 1..414: note = HA-NLS-RNF125-(GS)4-3DX.1 peptide
MYPYDVPDYAPAAKRVKLDGSGSGSGSVLSTDSGKSAPASATARALERRRDPELPVTSFDCAVCLEVLHQPVRTRCGHVFCRSCIATSLKNNKWTCPYCRAYLPSEGVPATDVAKRMKSEYKNCAECDTLVCLSEMRAHIRTCQKYIDKYGPGSGSGSGSEVKLVESGGDLVKPGGSLKLSCAASGFTFSHYGMSWVRQTPDKRLEWVATIGSRGTYTHYPDSVKGRFTISRDNDKNALYLQMNSLRTEDTAMYYCARKSEFYYYGNTYYYSAMDYWGQGASVTVSSGGGGSGGGDSGGGGSDIVLTQSPASLAVSLGQRATISCRASESVDNYGFSFMNWFQQKPGQPPKLLIYATSNRGSGVPARFSGSGSGTDFSLNIHPVEEDDSAMYFCQQTKEVPWTFGGGTKLEIKR

SEQ ID NO: 142 - protein, 416 aa, synthetic construct
  source 1..416: note = HA-NLS-RNF125-(GS)5-3DX.1 peptide
MYPYDVPDYAPAAKRVKLDGSGSGSGSVLSTDSGKSAPASATARALERRRDPELPVTSFDCAVCLEVLHQPVRTRCGHVFCRSCIATSLKNNKWTCPYCRAYLPSEGVPATDVAKRMKSEYKNCAECDTLVCLSEMRAHIRTCQKYIDKYGPGSGSGSGSGSEVKLVESGGDLVKPGGSLKLSCAASGFTFSHYGMSWVRQTPDKRLEWVATIGSRGTYTHYPDSVKGRFTISRDNDKNALYLQMNSLRTEDTAMYYCARKSEFYYYGNTYYYSAMDYWGQGASVTVSSGGGGSGGGDSGGGGSDIVLTQSPASLAVSLGQRATISCRASESVDNYGFSFMNWFQQKPGQPPKLLIYATSNRGSGVPARFSGSGSGTDFSLNIHPVEEDDSAMYFCQQTKEVPWTFGGGTKLEIKR

SEQ ID NO: 143 - protein, 418 aa, synthetic construct
  source 1..418: note = HA-NLS-RNF125-(GS)6-3DX.1 peptide
MYPYDVPDYAPAAKRVKLDGSGSGSGSVLSTDSGKSAPASATARALERRRDPELPVTSFDCAVCLEVLHQPVRTRCGHVFCRSCIATSLKNNKWTCPYCRAYLPSEGVPATDVAKRMKSEYKNCAECDTLVCLSEMRAHIRTCQKYIDKYGPGSGSGSGSGSGSEVKLVESGGDLVKPGGSLKLSCAASGFTFSHYGMSWVRQTPDKRLEWVATIGSRGTYTHYPDSVKGRFTISRDNDKNALYLQMNSLRTEDTAMYYCARKSEFYYYGNTYYYSAMDYWGQGASVTVSSGGGGSGGGDSGGGGSDIVLTQSPASLAVSLGQRATISCRASESVDNYGFSFMNWFQQKPGQPPKLLIYATSNRGSGVPARFSGSGSGTDFSLNIHPVEEDDSAMYFCQQTKEVPWTFGGGTKLEIKR

SEQ ID NO: 144 - protein, 498 aa, synthetic construct
  source 1..498: note = 3DX.1-(GS)1-SPOP-NLS peptide
MEVKLVESGGDLVKPGGSLKLSCAASGFTFSHYGMSWVRQTPDKRLEWVATIGSRGTYTHYPDSVKGRFTISRDNDKNALYLQMNSLRTEDTAMYYCARKSEFYYYGNTYYYSAMDYWGQGASVTVSSGGGGSGGGDSGGGGSDIVLTQSPASLAVSLGQRATISCRASESVDNYGFSFMNWFQQKPGQPPKLLIYATSNRGSGVPARFSGSGSGTDFSLNIHPVEEDDSAMYFCQQTKEVPWTFGGGTKLEIKRGSNGLLPDDKLTLFCEVSVVQDSVNISGQNTMNMVKVPECRLADELGGLWENSRFTDCCLCVAGQEFQAHKAILAARSPVFSAMFEHEMEESKKNRVEINDVEPEVFKEMMCFIYTGKAPNLDKMADDLLAAADKYALERLKVMCEDALCSNLSVENAAEILILADLHSADQLKTQAVDFINYHASDVLETSGWKSMVVSHPHLVAEAYRSLASAQCPFLGPPRKRLKQSGSGSPAAKRVKLD

SEQ ID NO: 145 - protein, 500 aa, synthetic construct
  source 1..500: note = 3DX.1-(GS)2-SPOP-NLS peptide
MEVKLVESGGDLVKPGGSLKLSCAASGFTFSHYGMSWVRQTPDKRLEWVATIGSRGTYTHYPDSVKGRFTISRDNDKNALYLQMNSLRTEDTAMYYCARKSEFYYYGNTYYYSAMDYWGQGASVTVSSGGGGSGGGDSGGGGSDIVLTQSPASLAVSLGQRATISCRASESVDNYGFSFMNWFQQKPGQPPKLLIYATSNRGSGVPARFSGSGSGTDFSLNIHPVEEDDSAMYFCQQTKEVPWTFGGGTKLEIKRGSGSNGLLPDDKLTLFCEVSVVQDSVNISGQNTMNMVKVPECRLADELGGLWENSRFTDCCLCVAGQEFQAHKAILAARSPVFSAMFEHEMEESKKNRVEINDVEPEVFKEMMCFIYTGKAPNLDKMADDLLAAADKYALERLKVMCEDALCSNLSVENAAEILILADLHSADQLKTQAVDFINYHASDVLETSGWKSMVVSHPHLVAEAYRSLASAQCPFLGPPRKRLKQSGSGSPAAKRVKLD

SEQ ID NO: 146 - protein, 502 aa, synthetic construct
  source 1..502: note = 3DX.1-(GS)3-SPOP-NLS peptide
MEVKLVESGGDLVKPGGSLKLSCAASGFTFSHYGMSWVRQTPDKRLEWVATIGSRGTYTHYPDSVKGRFTISRDNDKNALYLQMNSLRTEDTAMYYCARKSEFYYYGNTYYYSAMDYWGQGASVTVSSGGGGSGGGDSGGGGSDIVLTQSPASLAVSLGQRATISCRASESVDNYGFSFMNWFQQKPGQPPKLLIYATSNRGSGVPARFSGSGSGTDFSLNIHPVEEDDSAMYFCQQTKEVPWTFGGGTKLEIKRGSGSGSNGLLPDDKLTLFCEVSVVQDSVNISGQNTMNMVKVPECRLADELGGLWENSRFTDCCLCVAGQEFQAHKAILAARSPVFSAMFEHEMEESKKNRVEINDVEPEVFKEMMCFIYTGKAPNLDKMADDLLAAADKYALERLKVMCEDALCSNLSVENAAEILILADLHSADQLKTQAVDFINYHASDVLETSGWKSMVVSHPHLVAEAYRSLASAQCPFLGPPRKRLKQSGSGSPAAKRVKLD

SEQ ID NO: 147 - protein, 504 aa, synthetic construct
  source 1..504: note = 3DX.1-(GS)4-SPOP-NLS peptide
MEVKLVESGGDLVKPGGSLKLSCAASGFTFSHYGMSWVRQTPDKRLEWVATIGSRGTYTHYPDSVKGRFTISRDNDKNALYLQMNSLRTEDTAMYYCARKSEFYYYGNTYYYSAMDYWGQGASVTVSSGGGGSGGGDSGGGGSDIVLTQSPASLAVSLGQRATISCRASESVDNYGFSFMNWFQQKPGQPPKLLIYATSNRGSGVPARFSGSGSGTDFSLNIHPVEEDDSAMYFCQQTKEVPWTFGGGTKLEIKRGSGSGSGSNGLLPDDKLTLFCEVSVVQDSVNISGQNTMNMVKVPECRLADELGGLWENSRFTDCCLCVAGQEFQAHKAILAARSPVFSAMFEHEMEESKKNRVEINDVEPEVFKEMMCFIYTGKAPNLDKMADDLLAAADKYALERLKVMCEDALCSNLSVENAAEILILADLHSADQLKTQAVDFINYHASDVLETSGWKSMVVSHPHLVAEAYRSLASAQCPFLGPPRKRLKQSGSGSPAAKRVKLD

SEQ ID NO: 148 - protein, 507 aa, synthetic construct
  source 1..507: note = 3DX.1-(GS)5-SPOP-NLS peptide
MEVKLVESGGDLVKPGGSLKLSCAASGFTFSHYGMSWVRQTPDKRLEWVATIGSRGTYTHYPDSVKGRFTISRDNDKNALYLQMNSLRTEDTAMYYCARKSEFYYYGNTYYYSAMDYWGQGASVTVSSGGGGSGGGDSGGGGSDIVLTQSPASLAVSLGQRATISCRASESVDNYGFSFMNWFQQKPGQPPKLLIYATSNRGSGVPARFSGSGSGTDFSLNIHPVEEDDSAMYFCQQTKEVPWTFGGGTKLEIKRGSGSGSGSGSNGLLPDDKLTLFCEVSVVQDSVNISGQNTMNMVKVPECRLADELGGLWENSRFTDCCLCVAGQEFQAHKAILAARSPVFSAMFEHEMEESKKNRVEINDVEPEVFKEMMCFIYTGKAPNLDKMADDLLAAADKYALERLKVMCEDALCSNLSVENAAEILILADLHSADQLKTQAVDFINYHASDVLETSGWKSMVVSHPHLVAEAYRSLASAQCPFLGPPRKRLKQSGSGSPAAKRVKLDA

SEQ ID NO: 149 - protein, 508 aa, synthetic construct
  source 1..508: note = 3DX.1-(GS)6-SPOP-NLS peptide
MEVKLVESGGDLVKPGGSLKLSCAASGFTFSHYGMSWVRQTPDKRLEWVATIGSRGTYTHYPDSVKGRFTISRDNDKNALYLQMNSLRTEDTAMYYCARKSEFYYYGNTYYYSAMDYWGQGASVTVSSGGGGSGGGDSGGGGSDIVLTQSPASLAVSLGQRATISCRASESVDNYGFSFMNWFQQKPGQPPKLLIYATSNRGSGVPARFSGSGSGTDFSLNIHPVEEDDSAMYFCQQTKEVPWTFGGGTKLEIKRGSGSGSGSGSGSNGLLPDDKLTLFCEVSVVQDSVNISGQNTMNMVKVPECRLADELGGLWENSRFTDCCLCVAGQEFQAHKAILAARSPVFSAMFEHEMEESKKNRVEINDVEPEVFKEMMCFIYTGKAPNLDKMADDLLAAADKYALERLKVMCEDALCSNLSVENAAEILILADLHSADQLKTQAVDFINYHASDVLETSGWKSMVVSHPHLVAEAYRSLASAQCPFLGPPRKRLKQSGSGSPAAKRVKLD

SEQ ID NO: 150 - protein, 507 aa, synthetic construct
  source 1..507: note = 3DX.1-(GS)1-SPOP-NLS-HA peptide
MEVKLVESGGDLVKPGGSLKLSCAASGFTFSHYGMSWVRQTPDKRLEWVATIGSRGTYTHYPDSVKGRFTISRDNDKNALYLQMNSLRTEDTAMYYCARKSEFYYYGNTYYYSAMDYWGQGASVTVSSGGGGSGGGDSGGGGSDIVLTQSPASLAVSLGQRATISCRASESVDNYGFSFMNWFQQKPGQPPKLLIYATSNRGSGVPARFSGSGSGTDFSLNIHPVEEDDSAMYFCQQTKEVPWTFGGGTKLEIKRGSNGLLPDDKLTLFCEVSVVQDSVNISGQNTMNMVKVPECRLADELGGLWENSRFTDCCLCVAGQEFQAHKAILAARSPVFSAMFEHEMEESKKNRVEINDVEPEVFKEMMCFIYTGKAPNLDKMADDLLAAADKYALERLKVMCEDALCSNLSVENAAEILILADLHSADQLKTQAVDFINYHASDVLETSGWKSMVVSHPHLVAEAYRSLASAQCPFLGPPRKRLKQSGSGSPAAKRVKLDYPYDVPDYA

SEQ ID NO: 151 - protein, 509 aa, synthetic construct
  source 1..509: note = 3DX.1-(GS)2-SPOP-NLS-HA peptide
MEVKLVESGGDLVKPGGSLKLSCAASGFTFSHYGMSWVRQTPDKRLEWVATIGSRGTYTHYPDSVKGRFTISRDNDKNALYLQMNSLRTEDTAMYYCARKSEFYYYGNTYYYSAMDYWGQGASVTVSSGGGGSGGGDSGGGGSDIVLTQSPASLAVSLGQRATISCRASESVDNYGFSFMNWFQQKPGQPPKLLIYATSNRGSGVPARFSGSGSGTDFSLNIHPVEEDDSAMYFCQQTKEVPWTFGGGTKLEIKRGSGSNGLLPDDKLTLFCEVSVVQDSVNISGQNTMNMVKVPECRLADELGGLWENSRFTDCCLCVAGQEFQAHKAILAARSPVFSAMFEHEMEESKKNRVEINDVEPEVFKEMMCFIYTGKAPNLDKMADDLLAAADKYALERLKVMCEDALCSNLSVENAAEILILADLHSADQLKTQAVDFINYHASDVLETSGWKSMVVSHPHLVAEAYRSLASAQCPFLGPPRKRLKQSGSGSPAAKRVKLDYPYDVPDYA

SEQ ID NO: 152 - protein, 511 aa, synthetic construct
  source 1..511: note = 3DX.1-(GS)3-SPOP-NLS-HA peptide
MEVKLVESGGDLVKPGGSLKLSCAASGFTFSHYGMSWVRQTPDKRLEWVATIGSRGTYTHYPDSVKGRFTISRDNDKNALYLQMNSLRTEDTAMYYCARKSEFYYYGNTYYYSAMDYWGQGASVTVSSGGGGSGGGDSGGGGSDIVLTQSPASLAVSLGQRATISCRASESVDNYGFSFMNWFQQKPGQPPKLLIYATSNRGSGVPARFSGSGSGTDFSLNIHPVEEDDSAMYFCQQTKEVPWTFGGGTKLEIKRGSGSGSNGLLPDDKLTLFCEVSVVQDSVNISGQNTMNMVKVPECRLADELGGLWENSRFTDCCLCVAGQEFQAHKAILAARSPVFSAMFEHEMEESKKNRVEINDVEPEVFKEMMCFIYTGKAPNLDKMADDLLAAADKYALERLKVMCEDALCSNLSVENAAEILILADLHSADQLKTQAVDFINYHASDVLETSGWKSMVVSHPHLVAEAYRSLASAQCPFLGPPRKRLKQSGSGSPAAKRVKLDYPYDVPDYA

SEQ ID NO: 153 - protein, 513 aa, synthetic construct
  source 1..513: note = 3DX.1-(GS)4-SPOP-NLS-HA peptide
MEVKLVESGGDLVKPGGSLKLSCAASGFTFSHYGMSWVRQTPDKRLEWVATIGSRGTYTHYPDSVKGRFTISRDNDKNALYLQMNSLRTEDTAMYYCARKSEFYYYGNTYYYSAMDYWGQGASVTVSSGGGGSGGGDSGGGGSDIVLTQSPASLAVSLGQRATISCRASESVDNYGFSFMNWFQQKPGQPPKLLIYATSNRGSGVPARFSGSGSGTDFSLNIHPVEEDDSAMYFCQQTKEVPWTFGGGTKLEIKRGSGSGSGSNGLLPDDKLTLFCEVSVVQDSVNISGQNTMNMVKVPECRLADELGGLWENSRFTDCCLCVAGQEFQAHKAILAARSPVFSAMFEHEMEESKKNRVEINDVEPEVFKEMMCFIYTGKAPNLDKMADDLLAAADKYALERLKVMCEDALCSNLSVENAAEILILADLHSADQLKTQAVDFINYHASDVLETSGWKSMVVSHPHLVAEAYRSLASAQCPFLGPPRKRLKQSGSGSPAAKRVKLDYPYDVPDYA

SEQ ID NO: 154 - protein, 516 aa, synthetic construct
  source 1..516: note = 3DX.1-(GS)5-SPOP-NLS-HA peptide
MEVKLVESGGDLVKPGGSLKLSCAASGFTFSHYGMSWVRQTPDKRLEWVATIGSRGTYTHYPDSVKGRFTISRDNDKNALYLQMNSLRTEDTAMYYCARKSEFYYYGNTYYYSAMDYWGQGASVTVSSGGGGSGGGDSGGGGSDIVLTQSPASLAVSLGQRATISCRASESVDNYGFSFMNWFQQKPGQPPKLLIYATSNRGSGVPARFSGSGSGTDFSLNIHPVEEDDSAMYFCQQTKEVPWTFGGGTKLEIKRGSGSGSGSGSNGLLPDDKLTLFCEVSVVQDSVNISGQNTMNMVKVPECRLADELGGLWENSRFTDCCLCVAGQEFQAHKAILAARSPVFSAMFEHEMEESKKNRVEINDVEPEVFKEMMCFIYTGKAPNLDKMADDLLAAADKYALERLKVMCEDALCSNLSVENAAEILILADLHSADQLKTQAVDFINYHASDVLETSGWKSMVVSHPHLVAEAYRSLASAQCPFLGPPRKRLKQSGSGSPAAKRVKLDYPYDVPDYAA

SEQ ID NO: 155 - protein, 517 aa, synthetic construct
  source 1..517: note = 3DX.1-(GS)6-SPOP-NLS-HA peptide
MEVKLVESGGDLVKPGGSLKLSCAASGFTFSHYGMSWVRQTPDKRLEWVATIGSRGTYTHYPDSVKGRFTISRDNDKNALYLQMNSLRTEDTAMYYCARKSEFYYYGNTYYYSAMDYWGQGASVTVSSGGGGSGGGDSGGGGSDIVLTQSPASLAVSLGQRATISCRASESVDNYGFSFMNWFQQKPGQPPKLLIYATSNRGSGVPARFSGSGSGTDFSLNIHPVEEDDSAMYFCQQTKEVPWTFGGGTKLEIKRGSGSGSGSGSGSNGLLPDDKLTLFCEVSVVQDSVNISGQNTMNMVKVPECRLADELGGLWENSRFTDCCLCVAGQEFQAHKAILAARSPVFSAMFEHEMEESKKNRVEINDVEPEVFKEMMCFIYTGKAPNLDKMADDLLAAADKYALERLKVMCEDALCSNLSVENAAEILILADLHSADQLKTQAVDFINYHASDVLETSGWKSMVVSHPHLVAEAYRSLASAQCPFLGPPRKRLKQSGSGSPAAKRVKLDYPYDVPDYA

SEQ ID NO: 156 - protein, 446 aa, synthetic construct
  source 1..446: note = 3DX.2-(GS)1-CHIP-NLS peptide
MDIVLTQSPASLAVSLGQRATISCRASESVDNYGFSFMNWFQQKPGQPPKLLIYATSNRGSGVPARFSGSGSGTDFSLNIHPVEEDDSAMYFCQQTKEVPWTFGGGTKLEIKRGGGGSGGGDSGGGGSEVKLVESGGDLVKPGGSLKLSCAASGFTFSHYGMSWVRQTPDKRLEWVATIGSRGTYTHYPDSVKGRFTISRDNDKNALYLQMNSLRTEDTAMYYCARKSEFYYYGNTYYYSAMDYWGQGASVTVSSGSRLNFGDDIPSALRIAKKKRWNSIEERRIHQESELHSYLSRLIAAERERELEECQRNHEGDEDDSHVRAQQACIEAKHDKYMADMDELFSQVDEKRKKRDIPDYLCGKISFELMREPCITPSGITYDRKDIEEHLQRVGHFDPVTRSPLTQEQLIPNLAMKEVIDAFISENGWVEDYGSGSPAAKRVKLD

SEQ ID NO: 157 - protein, 448 aa, synthetic construct
  source 1..448: note = 3DX.2-(GS)2-CHIP-NLS peptide
MDIVLTQSPASLAVSLGQRATISCRASESVDNYGFSFMNWFQQKPGQPPKLLIYATSNRGSGVPARFSGSGSGTDFSLNIHPVEEDDSAMYFCQQTKEVPWTFGGGTKLEIKRGGGGSGGGDSGGGGSEVKLVESGGDLVKPGGSLKLSCAASGFTFSHYGMSWVRQTPDKRLEWVATIGSRGTYTHYPDSVKGRFTISRDNDKNALYLQMNSLRTEDTAMYYCARKSEFYYYGNTYYYSAMDYWGQGASVTVSSGSGSRLNFGDDIPSALRIAKKKRWNSIEERRIHQESELHSYLSRLIAAERERELEECQRNHEGDEDDSHVRAQQACIEAKHDKYMADMDELFSQVDEKRKKRDIPDYLCGKISFELMREPCITPSGITYDRKDIEEHLQRVGHFDPVTRSPLTQEQLIPNLAMKEVIDAFISENGWVEDYGSGSPAAKRVKLD

SEQ ID NO: 158 - protein, 450 aa, synthetic construct
  source 1..450: note = 3DX.2-(GS)3-CHIP-NLS peptide
MDIVLTQSPASLAVSLGQRATISCRASESVDNYGFSFMNWFQQKPGQPPKLLIYATSNRGSGVPARFSGSGSGTDFSLNIHPVEEDDSAMYFCQQTKEVPWTFGGGTKLEIKRGGGGSGGGDSGGGGSEVKLVESGGDLVKPGGSLKLSCAASGFTFSHYGMSWVRQTPDKRLEWVATIGSRGTYTHYPDSVKGRFTISRDNDKNALYLQMNSLRTEDTAMYYCARKSEFYYYGNTYYYSAMDYWGQGASVTVSSGSGSGSRLNFGDDIPSALRIAKKKRWNSIEERRIHQESELHSYLSRLIAAERERELEECQRNHEGDEDDSHVRAQQACIEAKHDKYMADMDELFSQVDEKRKKRDIPDYLCGKISFELMREPCITPSGITYDRKDIEEHLQRVGHFDPVTRSPLTQEQLIPNLAMKEVIDAFISENGWVEDYGSGSPAAKRVKLD

SEQ ID NO: 159 - protein, 452 aa, synthetic construct
  source 1..452: note = 3DX.2-(GS)4-CHIP-NLS peptide
MDIVLTQSPASLAVSLGQRATISCRASESVDNYGFSFMNWFQQKPGQPPKLLIYATSNRGSGVPARFSGSGSGTDFSLNIHPVEEDDSAMYFCQQTKEVPWTFGGGTKLEIKRGGGGSGGGDSGGGGSEVKLVESGGDLVKPGGSLKLSCAASGFTFSHYGMSWVRQTPDKRLEWVATIGSRGTYTHYPDSVKGRFTISRDNDKNALYLQMNSLRTEDTAMYYCARKSEFYYYGNTYYYSAMDYWGQGASVTVSSGSGSGSGSRLNFGDDIPSALRIAKKKRWNSIEERRIHQESELHSYLSRLIAAERERELEECQRNHEGDEDDSHVRAQQACIEAKHDKYMADMDELFSQVDEKRKKRDIPDYLCGKISFELMREPCITPSGITYDRKDIEEHLQRVGHFDPVTRSPLTQEQLIPNLAMKEVIDAFISENGWVEDYGSGSPAAKRVKLD

SEQ ID NO: 160 - protein, 454 aa, synthetic construct
  source 1..454: note = 3DX.2-(GS)5-CHIP-NLS peptide
MDIVLTQSPASLAVSLGQRATISCRASESVDNYGFSFMNWFQQKPGQPPKLLIYATSNRGSGVPARFSGSGSGTDFSLNIHPVEEDDSAMYFCQQTKEVPWTFGGGTKLEIKRGGGGSGGGDSGGGGSEVKLVESGGDLVKPGGSLKLSCAASGFTFSHYGMSWVRQTPDKRLEWVATIGSRGTYTHYPDSVKGRFTISRDNDKNALYLQMNSLRTEDTAMYYCARKSEFYYYGNTYYYSAMDYWGQGASVTVSSGSGSGSGSGSRLNFGDDIPSALRIAKKKRWNSIEERRIHQESELHSYLSRLIAAERERELEECQRNHEGDEDDSHVRAQQACIEAKHDKYMADMDELFSQVDEKRKKRDIPDYLCGKISFELMREPCITPSGITYDRKDIEEHLQRVGHFDPVTRSPLTQEQLIPNLAMKEVIDAFISENGWVEDYGSGSPAAKRVKLD

SEQ ID NO: 161 - protein, 456 aa, synthetic construct
  source 1..456: note = 3DX.2-(GS)6-CHIP-NLS peptide
MDIVLTQSPASLAVSLGQRATISCRASESVDNYGFSFMNWFQQKPGQPPKLLIYATSNRGSGVPARFSGSGSGTDFSLNIHPVEEDDSAMYFCQQTKEVPWTFGGGTKLEIKRGGGGSGGGDSGGGGSEVKLVESGGDLVKPGGSLKLSCAASGFTFSHYGMSWVRQTPDKRLEWVATIGSRGTYTHYPDSVKGRFTISRDNDKNALYLQMNSLRTEDTAMYYCARKSEFYYYGNTYYYSAMDYWGQGASVTVSSGSGSGSGSGSGSRLNFGDDIPSALRIAKKKRWNSIEERRIHQESELHSYLSRLIAAERERELEECQRNHEGDEDDSHVRAQQACIEAKHDKYMADMDELFSQVDEKRKKRDIPDYLCGKISFELMREPCITPSGITYDRKDIEEHLQRVGHFDPVTRSPLTQEQLIPNLAMKEVIDAFISENGWVEDYGSGSPAAKRVKLD

SEQ ID NO: 162 - protein, 455 aa, synthetic construct
  source 1..455: note = 3DX.2-(GS)1-CHIP-NLS-HA peptide
MDIVLTQSPASLAVSLGQRATISCRASESVDNYGFSFMNWFQQKPGQPPKLLIYATSNRGSGVPARFSGSGSGTDFSLNIHPVEEDDSAMYFCQQTKEVPWTFGGGTKLEIKRGGGGSGGGDSGGGGSEVKLVESGGDLVKPGGSLKLSCAASGFTFSHYGMSWVRQTPDKRLEWVATIGSRGTYTHYPDSVKGRFTISRDNDKNALYLQMNSLRTEDTAMYYCARKSEFYYYGNTYYYSAMDYWGQGASVTVSSGSRLNFGDDIPSALRIAKKKRWNSIEERRIHQESELHSYLSRLIAAERERELEECQRNHEGDEDDSHVRAQQACIEAKHDKYMADMDELFSQVDEKRKKRDIPDYLCGKISFELMREPCITPSGITYDRKDIEEHLQRVGHFDPVTRSPLTQEQLIPNLAMKEVIDAFISENGWVEDYGSGSPAAKRVKLDYPYDVPDYA

SEQ ID NO: 163 - protein, 457 aa, synthetic construct
  source 1..457: note = 3DX.2-(GS)2-CHIP-NLS-HA peptide
MDIVLTQSPASLAVSLGQRATISCRASESVDNYGFSFMNWFQQKPGQPPKLLIYATSNRGSGVPARFSGSGSGTDFSLNIHPVEEDDSAMYFCQQTKEVPWTFGGGTKLEIKRGGGGSGGGDSGGGGSEVKLVESGGDLVKPGGSLKLSCAASGFTFSHYGMSWVRQTPDKRLEWVATIGSRGTYTHYPDSVKGRFTISRDNDKNALYLQMNSLRTEDTAMYYCARKSEFYYYGNTYYYSAMDYWGQGASVTVSSGSGSRLNFGDDIPSALRIAKKKRWNSIEERRIHQESELHSYLSRLIAAERERELEECQRNHEGDEDDSHVRAQQACIEAKHDKYMADMDELFSQVDEKRKKRDIPDYLCGKISFELMREPCITPSGITYDRKDIEEHLQRVGHFDPVTRSPLTQEQLIPNLAMKEVIDAFISENGWVEDYGSGSPAAKRVKLDYPYDVPDYA

SEQ ID NO: 164 - protein, 459 aa, synthetic construct
  source 1..459: note = 3DX.2-(GS)3-CHIP-NLS-HA peptide
MDIVLTQSPASLAVSLGQRATISCRASESVDNYGFSFMNWFQQKPGQPPKLLIYATSNRGSGVPARFSGSGSGTDFSLNIHPVEEDDSAMYFCQQTKEVPWTFGGGTKLEIKRGGGGSGGGDSGGGGSEVKLVESGGDLVKPGGSLKLSCAASGFTFSHYGMSWVRQTPDKRLEWVATIGSRGTYTHYPDSVKGRFTISRDNDKNALYLQMNSLRTEDTAMYYCARKSEFYYYGNTYYYSAMDYWGQGASVTVSSGSGSGSRLNFGDDIPSALRIAKKKRWNSIEERRIHQESELHSYLSRLIAAERERELEECQRNHEGDEDDSHVRAQQACIEAKHDKYMADMDELFSQVDEKRKKRDIPDYLCGKISFELMREPCITPSGITYDRKDIEEHLQRVGHFDPVTRSPLTQEQLIPNLAMKEVIDAFISENGWVEDYGSGSPAAKRVKLDYPYDVPDYA

SEQ ID NO: 165 - protein, 461 aa, synthetic construct
  source 1..461: note = 3DX.2-(GS)4-CHIP-NLS-HA peptide
MDIVLTQSPASLAVSLGQRATISCRASESVDNYGFSFMNWFQQKPGQPPKLLIYATSNRGSGVPARFSGSGSGTDFSLNIHPVEEDDSAMYFCQQTKEVPWTFGGGTKLEIKRGGGGSGGGDSGGGGSEVKLVESGGDLVKPGGSLKLSCAASGFTFSHYGMSWVRQTPDKRLEWVATIGSRGTYTHYPDSVKGRFTISRDNDKNALYLQMNSLRTEDTAMYYCARKSEFYYYGNTYYYSAMDYWGQGASVTVSSGSGSGSGSRLNFGDDIPSALRIAKKKRWNSIEERRIHQESELHSYLSRLIAAERERELEECQRNHEGDEDDSHVRAQQACIEAKHDKYMADMDELFSQVDEKRKKRDIPDYLCGKISFELMREPCITPSGITYDRKDIEEHLQRVGHFDPVTRSPLTQEQLIPNLAMKEVIDAFISENGWVEDYGSGSPAAKRVKLDYPYDVPDYA

SEQ ID NO: 166 - protein, 463 aa, synthetic construct
  source 1..463: note = 3DX.2-(GS)5-CHIP-NLS-HA peptide
MDIVLTQSPASLAVSLGQRATISCRASESVDNYGFSFMNWFQQKPGQPPKLLIYATSNRGSGVPARFSGSGSGTDFSLNIHPVEEDDSAMYFCQQTKEVPWTFGGGTKLEIKRGGGGSGGGDSGGGGSEVKLVESGGDLVKPGGSLKLSCAASGFTFSHYGMSWVRQTPDKRLEWVATIGSRGTYTHYPDSVKGRFTISRDNDKNALYLQMNSLRTEDTAMYYCARKSEFYYYGNTYYYSAMDYWGQGASVTVSSGSGSGSGSGSRLNFGDDIPSALRIAKKKRWNSIEERRIHQESELHSYLSRLIAAERERELEECQRNHEGDEDDSHVRAQQACIEAKHDKYMADMDELFSQVDEKRKKRDIPDYLCGKISFELMREPCITPSGITYDRKDIEEHLQRVGHFDPVTRSPLTQEQLIPNLAMKEVIDAFISENGWVEDYGSGSPAAKRVKLDYPYDVPDYA

SEQ ID NO: 167 - protein, 465 aa, synthetic construct
  source 1..465: note = 3DX.2-(GS)6-CHIP-NLS-HA peptide
MDIVLTQSPASLAVSLGQRATISCRASESVDNYGFSFMNWFQQKPGQPPKLLIYATSNRGSGVPARFSGSGSGTDFSLNIHPVEEDDSAMYFCQQTKEVPWTFGGGTKLEIKRGGGGSGGGDSGGGGSEVKLVESGGDLVKPGGSLKLSCAASGFTFSHYGMSWVRQTPDKRLEWVATIGSRGTYTHYPDSVKGRFTISRDNDKNALYLQMNSLRTEDTAMYYCARKSEFYYYGNTYYYSAMDYWGQGASVTVSSGSGSGSGSGSGSRLNFGDDIPSALRIAKKKRWNSIEERRIHQESELHSYLSRLIAAERERELEECQRNHEGDEDDSHVRAQQACIEAKHDKYMADMDELFSQVDEKRKKRDIPDYLCGKISFELMREPCITPSGITYDRKDIEEHLQRVGHFDPVTRSPLTQEQLIPNLAMKEVIDAFISENGWVEDYGSGSPAAKRVKLDYPYDVPDYA

SEQ ID NO: 168 - protein, 306 aa, synthetic construct
  source 1..306: note = NLS-DCAF1-(GS)1-3DX.2 peptide
PAAKRVKLDGSGSGSQAPINFTSRLNRRASFPKYGGVDGGCFDRHLIFSRGSDIVLTQSPASLAVSLGQRATISCRASESVDNYGFSFMNWFQQKPGQPPKLLIYATSNRGSGVPARFSGSGSGTDFSLNIHPVEEDDSAMYFCQQTKEVPWTFGGGTKLEIKRGGGGSGGGDSGGGGSEVKLVESGGDLVKPGGSLKLSCAASGFTFSHYGMSWVRQTPDKRLEWVATIGSRGTYTHYPDSVKGRFTISRDNDKNALYLQMNSLRTEDTAMYYCARKSEFYYYGNTYYYSAMDYWGQGASVTVSS

SEQ ID NO: 169 - protein, 308 aa, synthetic construct
  source 1..308: note = NLS-DCAF1-(GS)2-3DX.2 peptide
PAAKRVKLDGSGSGSQAPINFTSRLNRRASFPKYGGVDGGCFDRHLIFSRGSGSDIVLTQSPASLAVSLGQRATISCRASESVDNYGFSFMNWFQQKPGQPPKLLIYATSNRGSGVPARFSGSGSGTDFSLNIHPVEEDDSAMYFCQQTKEVPWTFGGGTKLEIKRGGGGSGGGDSGGGGSEVKLVESGGDLVKPGGSLKLSCAASGFTFSHYGMSWVRQTPDKRLEWVATIGSRGTYTHYPDSVKGRFTISRDNDKNALYLQMNSLRTEDTAMYYCARKSEFYYYGNTYYYSAMDYWGQGASVTVSS

SEQ ID NO: 170 - protein, 310 aa, synthetic construct
  source 1..310: note = NLS-DCAF1-(GS)3-3DX.2 peptide
PAAKRVKLDGSGSGSQAPINFTSRLNRRASFPKYGGVDGGCFDRHLIFSRGSGSGSDIVLTQSPASLAVSLGQRATISCRASESVDNYGFSFMNWFQQKPGQPPKLLIYATSNRGSGVPARFSGSGSGTDFSLNIHPVEEDDSAMYFCQQTKEVPWTFGGGTKLEIKRGGGGSGGGDSGGGGSEVKLVESGGDLVKPGGSLKLSCAASGFTFSHYGMSWVRQTPDKRLEWVATIGSRGTYTHYPDSVKGRFTISRDNDKNALYLQMNSLRTEDTAMYYCARKSEFYYYGNTYYYSAMDYWGQGASVTVSS

SEQ ID NO: 171 - protein, 312 aa, synthetic construct
  source 1..312: note = NLS-DCAF1-(GS)4-3DX.2 peptide
PAAKRVKLDGSGSGSQAPINFTSRLNRRASFPKYGGVDGGCFDRHLIFSRGSGSGSGSDIVLTQSPASLAVSLGQRATISCRASESVDNYGFSFMNWFQQKPGQPPKLLIYATSNRGSGVPARFSGSGSGTDFSLNIHPVEEDDSAMYFCQQTKEVPWTFGGGTKLEIKRGGGGSGGGDSGGGGSEVKLVESGGDLVKPGGSLKLSCAASGFTFSHYGMSWVRQTPDKRLEWVATIGSRGTYTHYPDSVKGRFTISRDNDKNALYLQMNSLRTEDTAMYYCARKSEFYYYGNTYYYSAMDYWGQGASVTVSS

SEQ ID NO: 172 - protein, 314 aa, synthetic construct
  source 1..314: note = NLS-DCAF1-(GS)5-3DX.2 peptide
PAAKRVKLDGSGSGSQAPINFTSRLNRRASFPKYGGVDGGCFDRHLIFSRGSGSGSGSGSDIVLTQSPASLAVSLGQRATISCRASESVDNYGFSFMNWFQQKPGQPPKLLIYATSNRGSGVPARFSGSGSGTDFSLNIHPVEEDDSAMYFCQQTKEVPWTFGGGTKLEIKRGGGGSGGGDSGGGGSEVKLVESGGDLVKPGGSLKLSCAASGFTFSHYGMSWVRQTPDKRLEWVATIGSRGTYTHYPDSVKGRFTISRDNDKNALYLQMNSLRTEDTAMYYCARKSEFYYYGNTYYYSAMDYWGQGASVTVSS

SEQ ID NO: 173 - protein, 316 aa, synthetic construct
  source 1..316: note = NLS-DCAF1-(GS)6-3DX.2 peptide
PAAKRVKLDGSGSGSQAPINFTSRLNRRASFPKYGGVDGGCFDRHLIFSRGSGSGSGSGSGSDIVLTQSPASLAVSLGQRATISCRASESVDNYGFSFMNWFQQKPGQPPKLLIYATSNRGSGVPARFSGSGSGTDFSLNIHPVEEDDSAMYFCQQTKEVPWTFGGGTKLEIKRGGGGSGGGDSGGGGSEVKLVESGGDLVKPGGSLKLSCAASGFTFSHYGMSWVRQTPDKRLEWVATIGSRGTYTHYPDSVKGRFTISRDNDKNALYLQMNSLRTEDTAMYYCARKSEFYYYGNTYYYSAMDYWGQGASVTVSS

SEQ ID NO: 174 - protein, 316 aa, synthetic construct
  source 1..316: note = HA-NLS-DCAF1-(GS)1-3DX.2 peptide
MYPYDVPDYAPAAKRVKLDGSGSGSQAPINFTSRLNRRASFPKYGGVDGGCFDRHLIFSRGSDIVLTQSPASLAVSLGQRATISCRASESVDNYGFSFMNWFQQKPGQPPKLLIYATSNRGSGVPARFSGSGSGTDFSLNIHPVEEDDSAMYFCQQTKEVPWTFGGGTKLEIKRGGGGSGGGDSGGGGSEVKLVESGGDLVKPGGSLKLSCAASGFTFSHYGMSWVRQTPDKRLEWVATIGSRGTYTHYPDSVKGRFTISRDNDKNALYLQMNSLRTEDTAMYYCARKSEFYYYGNTYYYSAMDYWGQGASVTVSS

SEQ ID NO: 175 - protein, 318 aa, synthetic construct
  source 1..318: note = HA-NLS-DCAF1-(GS)2-3DX.2 peptide
MYPYDVPDYAPAAKRVKLDGSGSGSQAPINFTSRLNRRASFPKYGGVDGGCFDRHLIFSRGSGSDIVLTQSPASLAVSLGQRATISCRASESVDNYGFSFMNWFQQKPGQPPKLLIYATSNRGSGVPARFSGSGSGTDFSLNIHPVEEDDSAMYFCQQTKEVPWTFGGGTKLEIKRGGGGSGGGDSGGGGSEVKLVESGGDLVKPGGSLKLSCAASGFTFSHYGMSWVRQTPDKRLEWVATIGSRGTYTHYPDSVKGRFTISRDNDKNALYLQMNSLRTEDTAMYYCARKSEFYYYGNTYYYSAMDYWGQGASVTVSS

SEQ ID NO: 176 - protein, 320 aa, synthetic construct
  source 1..320: note = HA-NLS-DCAF1-(GS)3-3DX.2 peptide
MYPYDVPDYAPAAKRVKLDGSGSGSQAPINFTSRLNRRASFPKYGGVDGGCFDRHLIFSRGSGSGSDIVLTQSPASLAVSLGQRATISCRASESVDNYGFSFMNWFQQKPGQPPKLLIYATSNRGSGVPARFSGSGSGTDFSLNIHPVEEDDSAMYFCQQTKEVPWTFGGGTKLEIKRGGGGSGGGDSGGGGSEVKLVESGGDLVKPGGSLKLSCAASGFTFSHYGMSWVRQTPDKRLEWVATIGSRGTYTHYPDSVKGRFTISRDNDKNALYLQMNSLRTEDTAMYYCARKSEFYYYGNTYYYSAMDYWGQGASVTVSS

SEQ ID NO: 177 - protein, 322 aa, synthetic construct
  source 1..322: note = HA-NLS-DCAF1-(GS)4-3DX.2 peptide
MYPYDVPDYAPAAKRVKLDGSGSGSQAPINFTSRLNRRASFPKYGGVDGGCFDRHLIFSRGSGSGSGSDIVLTQSPASLAVSLGQRATISCRASESVDNYGFSFMNWFQQKPGQPPKLLIYATSNRGSGVPARFSGSGSGTDFSLNIHPVEEDDSAMYFCQQTKEVPWTFGGGTKLEIKRGGGGSGGGDSGGGGSEVKLVESGGDLVKPGGSLKLSCAASGFTFSHYGMSWVRQTPDKRLEWVATIGSRGTYTHYPDSVKGRFTISRDNDKNALYLQMNSLRTEDTAMYYCARKSEFYYYGNTYYYSAMDYWGQGASVTVSS

SEQ ID NO: 178 - protein, 324 aa, synthetic construct
  source 1..324: note = HA-NLS-DCAF1-(GS)5-3DX.2 peptide
MYPYDVPDYAPAAKRVKLDGSGSGSQAPINFTSRLNRRASFPKYGGVDGGCFDRHLIFSRGSGSGSGSGSDIVLTQSPASLAVSLGQRATISCRASESVDNYGFSFMNWFQQKPGQPPKLLIYATSNRGSGVPARFSGSGSGTDFSLNIHPVEEDDSAMYFCQQTKEVPWTFGGGTKLEIKRGGGGSGGGDSGGGGSEVKLVESGGDLVKPGGSLKLSCAASGFTFSHYGMSWVRQTPDKRLEWVATIGSRGTYTHYPDSVKGRFTISRDNDKNALYLQMNSLRTEDTAMYYCARKSEFYYYGNTYYYSAMDYWGQGASVTVSS

SEQ ID NO: 179 - protein, 326 aa, synthetic construct
  source 1..326: note = HA-NLS-DCAF1-(GS)6-3DX.2 peptide
MYPYDVPDYAPAAKRVKLDGSGSGSQAPINFTSRLNRRASFPKYGGVDGGCFDRHLIFSRGSGSGSGSGSGSDIVLTQSPASLAVSLGQRATISCRASESVDNYGFSFMNWFQQKPGQPPKLLIYATSNRGSGVPARFSGSGSGTDFSLNIHPVEEDDSAMYFCQQTKEVPWTFGGGTKLEIKRGGGGSGGGDSGGGGSEVKLVESGGDLVKPGGSLKLSCAASGFTFSHYGMSWVRQTPDKRLEWVATIGSRGTYTHYPDSVKGRFTISRDNDKNALYLQMNSLRTEDTAMYYCARKSEFYYYGNTYYYSAMDYWGQGASVTVSS

SEQ ID NO: 180 - protein, 627 aa, synthetic construct
  source 1..627: note = NLS-3DX.2-(GS)1-E6AP peptide
PAAKRVKLDGSGSGSDIVLTQSPASLAVSLGQRATISCRASESVDNYGFSFMNWFQQKPGQPPKLLIYATSNRGSGVPARFSGSGSGTDFSLNIHPVEEDDSAMYFCQQTKEVPWTFGGGTKLEIKRGGGGSGGGDSGGGGSEVKLVESGGDLVKPGGSLKLSCAASGFTFSHYGMSWVRQTPDKRLEWVATIGSRGTYTHYPDSVKGRFTISRDNDKNALYLQMNSLRTEDTAMYYCARKSEFYYYGNTYYYSAMDYWGQGASVTVSSGSNPYLRLKVRRDHIIDDALVRLEMIAMENPADLKKQLYVEFEGEQGVDEGGVSKEFFQLVVEEIFNPDIGMFTYDESTKLFWFNPSSFETEGQFTLIGIVLGLAIYNNCILDVHFPMVVYRKLMGKKGTFRDLGDSHPVLYQSLKDLLEYEGNVEDDMMITFQISQTDLFGNPMMYDLKENGDKIPITNENRKEFVNLYSDYILNKSVEKQFKAFRRGFHMVTNESPLKYLFRPEEIELLICGSRNLDFQALEETTEYDGGYTRDSVLIREFWEIVHSFTDEQKRLFLQFTTGTDRAPVGGLGKLKMIIAKNGPDTERLPTSHTCFNVLLLPEYSSKEKLKERLLKAITYAKGFGML

SEQ ID NO: 181 - protein, 629 aa, synthetic construct
  source 1..629: note = NLS-3DX.2-(GS)2-E6AP peptide
PAAKRVKLDGSGSGSDIVLTQSPASLAVSLGQRATISCRASESVDNYGFSFMNWFQQKPGQPPKLLIYATSNRGSGVPARFSGSGSGTDFSLNIHPVEEDDSAMYFCQQTKEVPWTFGGGTKLEIKRGGGGSGGGDSGGGGSEVKLVESGGDLVKPGGSLKLSCAASGFTFSHYGMSWVRQTPDKRLEWVATIGSRGTYTHYPDSVKGRFTISRDNDKNALYLQMNSLRTEDTAMYYCARKSEFYYYGNTYYYSAMDYWGQGASVTVSSGSGSNPYLRLKVRRDHIIDDALVRLEMIAMENPADLKKQLYVEFEGEQGVDEGGVSKEFFQLVVEEIFNPDIGMFTYDESTKLFWFNPSSFETEGQFTLIGIVLGLAIYNNCILDVHFPMVVYRKLMGKKGTFRDLGDSHPVLYQSLKDLLEYEGNVEDDMMITFQISQTDLFGNPMMYDLKENGDKIPITNENRKEFVNLYSDYILNKSVEKQFKAFRRGFHMVTNESPLKYLFRPEEIELLICGSRNLDFQALEETTEYDGGYTRDSVLIREFWEIVHSFTDEQKRLFLQFTTGTDRAPVGGLGKLKMIIAKNGPDTERLPTSHTCFNVLLLPEYSSKEKLKERLLKAITYAKGFGML

SEQ ID NO: 182 - protein, 631 aa, synthetic construct
  source 1..631: note = NLS-3DX.2-(GS)3-E6AP peptide
PAAKRVKLDGSGSGSDIVLTQSPASLAVSLGQRATISCRASESVDNYGFSFMNWFQQKPGQPPKLLIYATSNRGSGVPARFSGSGSGTDFSLNIHPVEEDDSAMYFCQQTKEVPWTFGGGTKLEIKRGGGGSGGGDSGGGGSEVKLVESGGDLVKPGGSLKLSCAASGFTFSHYGMSWVRQTPDKRLEWVATIGSRGTYTHYPDSVKGRFTISRDNDKNALYLQMNSLRTEDTAMYYCARKSEFYYYGNTYYYSAMDYWGQGASVTVSSGSGSGSNPYLRLKVRRDHIIDDALVRLEMIAMENPADLKKQLYVEFEGEQGVDEGGVSKEFFQLVVEEIFNPDIGMFTYDESTKLFWFNPSSFETEGQFTLIGIVLGLAIYNNCILDVHFPMVVYRKLMGKKGTFRDLGDSHPVLYQSLKDLLEYEGNVEDDMMITFQISQTDLFGNPMMYDLKENGDKIPITNENRKEFVNLYSDYILNKSVEKQFKAFRRGFHMVTNESPLKYLFRPEEIELLICGSRNLDFQALEETTEYDGGYTRDSVLIREFWEIVHSFTDEQKRLFLQFTTGTDRAPVGGLGKLKMIIAKNGPDTERLPTSHTCFNVLLLPEYSSKEKLKERLLKAITYAKGFGML

SEQ ID NO: 183 - protein, 633 aa, synthetic construct
  source 1..633: note = NLS-3DX.2-(GS)4-E6AP peptide
PAAKRVKLDGSGSGSDIVLTQSPASLAVSLGQRATISCRASESVDNYGFSFMNWFQQKPGQPPKLLIYATSNRGSGVPARFSGSGSGTDFSLNIHPVEEDDSAMYFCQQTKEVPWTFGGGTKLEIKRGGGGSGGGDSGGGGSEVKLVESGGDLVKPGGSLKLSCAASGFTFSHYGMSWVRQTPDKRLEWVATIGSRGTYTHYPDSVKGRFTISRDNDKNALYLQMNSLRTEDTAMYYCARKSEFYYYGNTYYYSAMDYWGQGASVTVSSGSGSGSGSNPYLRLKVRRDHIIDDALVRLEMIAMENPADLKKQLYVEFEGEQGVDEGGVSKEFFQLVVEEIFNPDIGMFTYDESTKLFWFNPSSFETEGQFTLIGIVLGLAIYNNCILDVHFPMVVYRKLMGKKGTFRDLGDSHPVLYQSLKDLLEYEGNVEDDMMITFQISQTDLFGNPMMYDLKENGDKIPITNENRKEFVNLYSDYILNKSVEKQFKAFRRGFHMVTNESPLKYLFRPEEIELLICGSRNLDFQALEETTEYDGGYTRDSVLIREFWEIVHSFTDEQKRLFLQFTTGTDRAPVGGLGKLKMIIAKNGPDTERLPTSHTCFNVLLLPEYSSKEKLKERLLKAITYAKGFGML

SEQ ID NO: 184 - protein, 635 aa, synthetic construct
  source 1..635: note = NLS-3DX.2-(GS)5-E6AP peptide
PAAKRVKLDGSGSGSDIVLTQSPASLAVSLGQRATISCRASESVDNYGFSFMNWFQQKPGQPPKLLIYATSNRGSGVPARFSGSGSGTDFSLNIHPVEEDDSAMYFCQQTKEVPWTFGGGTKLEIKRGGGGSGGGDSGGGGSEVKLVESGGDLVKPGGSLKLSCAASGFTFSHYGMSWVRQTPDKRLEWVATIGSRGTYTHYPDSVKGRFTISRDNDKNALYLQMNSLRTEDTAMYYCARKSEFYYYGNTYYYSAMDYWGQGASVTVSSGSGSGSGSGSNPYLRLKVRRDHIIDDALVRLEMIAMENPADLKKQLYVEFEGEQGVDEGGVSKEFFQLVVEEIFNPDIGMFTYDESTKLFWFNPSSFETEGQFTLIGIVLGLAIYNNCILDVHFPMVVYRKLMGKKGTFRDLGDSHPVLYQSLKDLLEYEGNVEDDMMITFQISQTDLFGNPMMYDLKENGDKIPITNENRKEFVNLYSDYILNKSVEKQFKAFRRGFHMVTNESPLKYLFRPEEIELLICGSRNLDFQALEETTEYDGGYTRDSVLIREFWEIVHSFTDEQKRLFLQFTTGTDRAPVGGLGKLKMIIAKNGPDTERLPTSHTCFNVLLLPEYSSKEKLKERLLKAITYAKGFGML

SEQ ID NO: 185 - protein, 637 aa, synthetic construct
  source 1..637: note = NLS-3DX.2-(GS)6-E6AP peptide
PAAKRVKLDGSGSGSDIVLTQSPASLAVSLGQRATISCRASESVDNYGFSFMNWFQQKPGQPPKLLIYATSNRGSGVPARFSGSGSGTDFSLNIHPVEEDDSAMYFCQQTKEVPWTFGGGTKLEIKRGGGGSGGGDSGGGGSEVKLVESGGDLVKPGGSLKLSCAASGFTFSHYGMSWVRQTPDKRLEWVATIGSRGTYTHYPDSVKGRFTISRDNDKNALYLQMNSLRTEDTAMYYCARKSEFYYYGNTYYYSAMDYWGQGASVTVSSGSGSGSGSGSGSNPYLRLKVRRDHIIDDALVRLEMIAMENPADLKKQLYVEFEGEQGVDEGGVSKEFFQLVVEEIFNPDIGMFTYDESTKLFWFNPSSFETEGQFTLIGIVLGLAIYNNCILDVHFPMVVYRKLMGKKGTFRDLGDSHPVLYQSLKDLLEYEGNVEDDMMITFQISQTDLFGNPMMYDLKENGDKIPITNENRKEFVNLYSDYILNKSVEKQFKAFRRGFHMVTNESPLKYLFRPEEIELLICGSRNLDFQALEETTEYDGGYTRDSVLIREFWEIVHSFTDEQKRLFLQFTTGTDRAPVGGLGKLKMIIAKNGPDTERLPTSHTCFNVLLLPEYSSKEKLKERLLKAITYAKGFGML

SEQ ID NO: 186 - protein, 637 aa, synthetic construct
  source 1..637: note = HA-NLS-3DX.2-(GS)1-E6AP peptide
MYPYDVPDYAPAAKRVKLDGSGSGSDIVLTQSPASLAVSLGQRATISCRASESVDNYGFSFMNWFQQKPGQPPKLLIYATSNRGSGVPARFSGSGSGTDFSLNIHPVEEDDSAMYFCQQTKEVPWTFGGGTKLEIKRGGGGSGGGDSGGGGSEVKLVESGGDLVKPGGSLKLSCAASGFTFSHYGMSWVRQTPDKRLEWVATIGSRGTYTHYPDSVKGRFTISRDNDKNALYLQMNSLRTEDTAMYYCARKSEFYYYGNTYYYSAMDYWGQGASVTVSSGSNPYLRLKVRRDHIIDDALVRLEMIAMENPADLKKQLYVEFEGEQGVDEGGVSKEFFQLVVEEIFNPDIGMFTYDESTKLFWFNPSSFETEGQFTLIGIVLGLAIYNNCILDVHFPMVVYRKLMGKKGTFRDLGDSHPVLYQSLKDLLEYEGNVEDDMMITFQISQTDLFGNPMMYDLKENGDKIPITNENRKEFVNLYSDYILNKSVEKQFKAFRRGFHMVTNESPLKYLFRPEEIELLICGSRNLDFQALEETTEYDGGYTRDSVLIREFWEIVHSFTDEQKRLFLQFTTGTDRAPVGGLGKLKMIIAKNGPDTERLPTSHTCFNVLLLPEYSSKEKLKERLLKAITYAKGFGML

SEQ ID NO: 187 - protein, 639 aa, synthetic construct
  source 1..639: note = HA-NLS-3DX.2-(GS)2-E6AP peptide
MYPYDVPDYAPAAKRVKLDGSGSGSDIVLTQSPASLAVSLGQRATISCRASESVDNYGFSFMNWFQQKPGQPPKLLIYATSNRGSGVPARFSGSGSGTDFSLNIHPVEEDDSAMYFCQQTKEVPWTFGGGTKLEIKRGGGGSGGGDSGGGGSEVKLVESGGDLVKPGGSLKLSCAASGFTFSHYGMSWVRQTPDKRLEWVATIGSRGTYTHYPDSVKGRFTISRDNDKNALYLQMNSLRTEDTAMYYCARKSEFYYYGNTYYYSAMDYWGQGASVTVSSGSGSNPYLRLKVRRDHIIDDALVRLEMIAMENPADLKKQLYVEFEGEQGVDEGGVSKEFFQLVVEEIFNPDIGMFTYDESTKLFWFNPSSFETEGQFTLIGIVLGLAIYNNCILDVHFPMVVYRKLMGKKGTFRDLGDSHPVLYQSLKDLLEYEGNVEDDMMITFQISQTDLFGNPMMYDLKENGDKIPITNENRKEFVNLYSDYILNKSVEKQFKAFRRGFHMVTNESPLKYLFRPEEIELLICGSRNLDFQALEETTEYDGGYTRDSVLIREFWEIVHSFTDEQKRLFLQFTTGTDRAPVGGLGKLKMIIAKNGPDTERLPTSHTCFNVLLLPEYSSKEKLKERLLKAITYAKGFGML

SEQ ID NO: 188 - protein, 641 aa, synthetic construct
  source 1..641: note = HA-NLS-3DX.2-(GS)3-E6AP peptide
MYPYDVPDYAPAAKRVKLDGSGSGSDIVLTQSPASLAVSLGQRATISCRASESVDNYGFSFMNWFQQKPGQPPKLLIYATSNRGSGVPARFSGSGSGTDFSLNIHPVEEDDSAMYFCQQTKEVPWTFGGGTKLEIKRGGGGSGGGDSGGGGSEVKLVESGGDLVKPGGSLKLSCAASGFTFSHYGMSWVRQTPDKRLEWVATIGSRGTYTHYPDSVKGRFTISRDNDKNALYLQMNSLRTEDTAMYYCARKSEFYYYGNTYYYSAMDYWGQGASVTVSSGSGSGSNPYLRLKVRRDHIIDDALVRLEMIAMENPADLKKQLYVEFEGEQGVDEGGVSKEFFQLVVEEIFNPDIGMFTYDESTKLFWFNPSSFETEGQFTLIGIVLGLAIYNNCILDVHFPMVVYRKLMGKKGTFRDLGDSHPVLYQSLKDLLEYEGNVEDDMMITFQISQTDLFGNPMMYDLKENGDKIPITNENRKEFVNLYSDYILNKSVEKQFKAFRRGFHMVTNESPLKYLFRPEEIELLICGSRNLDFQALEETTEYDGGYTRDSVLIREFWEIVHSFTDEQKRLFLQFTTGTDRAPVGGLGKLKMIIAKNGPDTERLPTSHTCFNVLLLPEYSSKEKLKERLLKAITYAKGFGML

SEQ ID NO: 189 - protein, 643 aa, synthetic construct
  source 1..643: note = HA-NLS-3DX.2-(GS)4-E6AP peptide
MYPYDVPDYAPAAKRVKLDGSGSGSDIVLTQSPASLAVSLGQRATISCRASESVDNYGFSFMNWFQQKPGQPPKLLIYATSNRGSGVPARFSGSGSGTDFSLNIHPVEEDDSAMYFCQQTKEVPWTFGGGTKLEIKRGGGGSGGGDSGGGGSEVKLVESGGDLVKPGGSLKLSCAASGFTFSHYGMSWVRQTPDKRLEWVATIGSRGTYTHYPDSVKGRFTISRDNDKNALYLQMNSLRTEDTAMYYCARKSEFYYYGNTYYYSAMDYWGQGASVTVSSGSGSGSGSNPYLRLKVRRDHIIDDALVRLEMIAMENPADLKKQLYVEFEGEQGVDEGGVSKEFFQLVVEEIFNPDIGMFTYDESTKLFWFNPSSFETEGQFTLIGIVLGLAIYNNCILDVHFPMVVYRKLMGKKGTFRDLGDSHPVLYQSLKDLLEYEGNVEDDMMITFQISQTDLFGNPMMYDLKENGDKIPITNENRKEFVNLYSDYILNKSVEKQFKAFRRGFHMVTNESPLKYLFRPEEIELLICGSRNLDFQALEETTEYDGGYTRDSVLIREFWEIVHSFTDEQKRLFLQFTTGTDRAPVGGLGKLKMIIAKNGPDTERLPTSHTCFNVLLLPEYSSKEKLKERLLKAITYAKGFGML

SEQ ID NO: 190 - protein, 645 aa, synthetic construct
  source 1..645: note = HA-NLS-3DX.2-(GS)5-E6AP peptide
MYPYDVPDYAPAAKRVKLDGSGSGSDIVLTQSPASLAVSLGQRATISCRASESVDNYGFSFMNWFQQKPGQPPKLLIYATSNRGSGVPARFSGSGSGTDFSLNIHPVEEDDSAMYFCQQTKEVPWTFGGGTKLEIKRGGGGSGGGDSGGGGSEVKLVESGGDLVKPGGSLKLSCAASGFTFSHYGMSWVRQTPDKRLEWVATIGSRGTYTHYPDSVKGRFTISRDNDKNALYLQMNSLRTEDTAMYYCARKSEFYYYGNTYYYSAMDYWGQGASVTVSSGSGSGSGSGSNPYLRLKVRRDHIIDDALVRLEMIAMENPADLKKQLYVEFEGEQGVDEGGVSKEFFQLVVEEIFNPDIGMFTYDESTKLFWFNPSSFETEGQFTLIGIVLGLAIYNNCILDVHFPMVVYRKLMGKKGTFRDLGDSHPVLYQSLKDLLEYEGNVEDDMMITFQISQTDLFGNPMMYDLKENGDKIPITNENRKEFVNLYSDYILNKSVEKQFKAFRRGFHMVTNESPLKYLFRPEEIELLICGSRNLDFQALEETTEYDGGYTRDSVLIREFWEIVHSFTDEQKRLFLQFTTGTDRAPVGGLGKLKMIIAKNGPDTERLPTSHTCFNVLLLPEYSSKEKLKERLLKAITYAKGFGML

SEQ ID NO: 191 - protein, 647 aa, synthetic construct
  source 1..647: note = HA-NLS-3DX.2-(GS)6-E6AP peptide
MYPYDVPDYAPAAKRVKLDGSGSGSDIVLTQSPASLAVSLGQRATISCRASESVDNYGFSFMNWFQQKPGQPPKLLIYATSNRGSGVPARFSGSGSGTDFSLNIHPVEEDDSAMYFCQQTKEVPWTFGGGTKLEIKRGGGGSGGGDSGGGGSEVKLVESGGDLVKPGGSLKLSCAASGFTFSHYGMSWVRQTPDKRLEWVATIGSRGTYTHYPDSVKGRFTISRDNDKNALYLQMNSLRTEDTAMYYCARKSEFYYYGNTYYYSAMDYWGQGASVTVSSGSGSGSGSGSGSNPYLRLKVRRDHIIDDALVRLEMIAMENPADLKKQLYVEFEGEQGVDEGGVSKEFFQLVVEEIFNPDIGMFTYDESTKLFWFNPSSFETEGQFTLIGIVLGLAIYNNCILDVHFPMVVYRKLMGKKGTFRDLGDSHPVLYQSLKDLLEYEGNVEDDMMITFQISQTDLFGNPMMYDLKENGDKIPITNENRKEFVNLYSDYILNKSVEKQFKAFRRGFHMVTNESPLKYLFRPEEIELLICGSRNLDFQALEETTEYDGGYTRDSVLIREFWEIVHSFTDEQKRLFLQFTTGTDRAPVGGLGKLKMIIAKNGPDTERLPTSHTCFNVLLLPEYSSKEKLKERLLKAITYAKGFGML

SEQ ID NO: 192 - protein, 623 aa, synthetic construct
  source 1..623: note = FBXW7a-(GS)1-3DX.2 peptide
NQELLSVGSKRRRTGGSLRGNPSSSQVDEEQMNRVVEEEQQQQLRQQEEEHTARNGEVVGVEPRPGGQNDSQQGQLEENNNRFISVDEDSSGNQEEQEEDEEHAGEQDEEDEEEEEMDQESDDFDQSDDSSREDEHTHTNSVTNSSSIVDLPVHQLSSPFYTKTTKMKRKLDHGSEVRSFSLGKKPCKVSEYTSTTGLVPCSATPTTFGDLRAANGQGQQRRRITSVQPPTGLQEWLKMFQSWSGPEKLLALDELIDSCEPTQVKHMMQVIEPQFQRDFISLLPKELALYVLSFLEPKDLLQAAQTCRYWRILAEDNLLWREKCKEEGIDEPLHIKRRKVIKPGFIHSPWKSAYIRQHRIDTNSRRGGSDIVLTQSPASLAVSLGQRATISCRASESVDNYGFSFMNWFQQKPGQPPKLLIYATSNRGSGVPARFSGSGSGTDFSLNIHPVEEDDSAMYFCQQTKEVPWTFGGGTKLEIKRGGGGSGGGDSGGGGSEVKLVESGGDLVKPGGSLKLSCAASGFTFSHYGMSWVRQTPDKRLEWVATIGSRGTYTHYPDSVKGRFTISRDNDKNALYLQMNSLRTEDTAMYYCARKSEFYYYGNTYYYSAMDYWGQGASVTVSS

SEQ ID NO: 193 - protein, 625 aa, synthetic construct
  source 1..625: note = FBXW7a-(GS)2-3DX.2 peptide
NQELLSVGSKRRRTGGSLRGNPSSSQVDEEQMNRVVEEEQQQQLRQQEEEHTARNGEVVGVEPRPGGQNDSQQGQLEENNNRFISVDEDSSGNQEEQEEDEEHAGEQDEEDEEEEEMDQESDDFDQSDDSSREDEHTHTNSVTNSSSIVDLPVHQLSSPFYTKTTKMKRKLDHGSEVRSFSLGKKPCKVSEYTSTTGLVPCSATPTTFGDLRAANGQGQQRRRITSVQPPTGLQEWLKMFQSWSGPEKLLALDELIDSCEPTQVKHMMQVIEPQFQRDFISLLPKELALYVLSFLEPKDLLQAAQTCRYWRILAEDNLLWREKCKEEGIDEPLHIKRRKVIKPGFIHSPWKSAYIRQHRIDTNSRRGGSGSDIVLTQSPASLAVSLGQRATISCRASESVDNYGFSFMNWFQQKPGQPPKLLIYATSNRGSGVPARFSGSGSGTDFSLNIHPVEEDDSAMYFCQQTKEVPWTFGGGTKLEIKRGGGGSGGGDSGGGGSEVKLVESGGDLVKPGGSLKLSCAASGFTFSHYGMSWVRQTPDKRLEWVATIGSRGTYTHYPDSVKGRFTISRDNDKNALYLQMNSLRTEDTAMYYCARKSEFYYYGNTYYYSAMDYWGQGASVTVSS

SEQ ID NO: 194 - protein, 627 aa, synthetic construct
  source 1..627: note = FBXW7a-(GS)3-3DX.2 peptide
NQELLSVGSKRRRTGGSLRGNPSSSQVDEEQMNRVVEEEQQQQLRQQEEEHTARNGEVVGVEPRPGGQNDSQQGQLEENNNRFISVDEDSSGNQEEQEEDEEHAGEQDEEDEEEEEMDQESDDFDQSDDSSREDEHTHTNSVTNSSSIVDLPVHQLSSPFYTKTTKMKRKLDHGSEVRSFSLGKKPCKVSEYTSTTGLVPCSATPTTFGDLRAANGQGQQRRRITSVQPPTGLQEWLKMFQSWSGPEKLLALDELIDSCEPTQVKHMMQVIEPQFQRDFISLLPKELALYVLSFLEPKDLLQAAQTCRYWRILAEDNLLWREKCKEEGIDEPLHIKRRKVIKPGFIHSPWKSAYIRQHRIDTNSRRGGSGSGSDIVLTQSPASLAVSLGQRATISCRASESVDNYGFSFMNWFQQKPGQPPKLLIYATSNRGSGVPARFSGSGSGTDFSLNIHPVEEDDSAMYFCQQTKEVPWTFGGGTKLEIKRGGGGSGGGDSGGGGSEVKLVESGGDLVKPGGSLKLSCAASGFTFSHYGMSWVRQTPDKRLEWVATIGSRGTYTHYPDSVKGRFTISRDNDKNALYLQMNSLRTEDTAMYYCARKSEFYYYGNTYYYSAMDYWGQGASVTVSS

SEQ ID NO: 195 - protein, 629 aa, synthetic construct
  source 1..629: note = FBXW7a-(GS)4-3DX.2 peptide
NQELLSVGSKRRRTGGSLRGNPSSSQVDEEQMNRVVEEEQQQQLRQQEEEHTARNGEVVGVEPRPGGQNDSQQGQLEENNNRFISVDEDSSGNQEEQEEDEEHAGEQDEEDEEEEEMDQESDDFDQSDDSSREDEHTHTNSVTNSSSIVDLPVHQLSSPFYTKTTKMKRKLDHGSEVRSFSLGKKPCKVSEYTSTTGLVPCSATPTTFGDLRAANGQGQQRRRITSVQPPTGLQEWLKMFQSWSGPEKLLALDELIDSCEPTQVKHMMQVIEPQFQRDFISLLPKELALYVLSFLEPKDLLQAAQTCRYWRILAEDNLLWREKCKEEGIDEPLHIKRRKVIKPGFIHSPWKSAYIRQHRIDTNSRRGGSGSGSGSDIVLTQSPASLAVSLGQRATISCRASESVDNYGFSFMNWFQQKPGQPPKLLIYATSNRGSGVPARFSGSGSGTDFSLNIHPVEEDDSAMYFCQQTKEVPWTFGGGTKLEIKRGGGGSGGGDSGGGGSEVKLVESGGDLVKPGGSLKLSCAASGFTFSHYGMSWVRQTPDKRLEWVATIGSRGTYTHYPDSVKGRFTISRDNDKNALYLQMNSLRTEDTAMYYCARKSEFYYYGNTYYYSAMDYWGQGASVTVSS

SEQ ID NO: 196 - protein, 631 aa, synthetic construct
  source 1..631: note = FBXW7a-(GS)5-3DX.2 peptide
NQELLSVGSKRRRTGGSLRGNPSSSQVDEEQMNRVVEEEQQQQLRQQEEEHTARNGEVVGVEPRPGGQNDSQQGQLEENNNRFISVDEDSSGNQEEQEEDEEHAGEQDEEDEEEEEMDQESDDFDQSDDSSREDEHTHTNSVTNSSSIVDLPVHQLSSPFYTKTTKMKRKLDHGSEVRSFSLGKKPCKVSEYTSTTGLVPCSATPTTFGDLRAANGQGQQRRRITSVQPPTGLQEWLKMFQSWSGPEKLLALDELIDSCEPTQVKHMMQVIEPQFQRDFISLLPKELALYVLSFLEPKDLLQAAQTCRYWRILAEDNLLWREKCKEEGIDEPLHIKRRKVIKPGFIHSPWKSAYIRQHRIDTNSRRGGSGSGSGSGSDIVLTQSPASLAVSLGQRATISCRASESVDNYGFSFMNWFQQKPGQPPKLLIYATSNRGSGVPARFSGSGSGTDFSLNIHPVEEDDSAMYFCQQTKEVPWTFGGGTKLEIKRGGGGSGGGDSGGGGSEVKLVESGGDLVKPGGSLKLSCAASGFTFSHYGMSWVRQTPDKRLEWVATIGSRGTYTHYPDSVKGRFTISRDNDKNALYLQMNSLRTEDTAMYYCARKSEFYYYGNTYYYSAMDYWGQGASVTVSS

SEQ ID NO: 197 - protein, 633 aa, synthetic construct
  source 1..633: note = FBXW7a-(GS)6-3DX.2 peptide
NQELLSVGSKRRRTGGSLRGNPSSSQVDEEQMNRVVEEEQQQQLRQQEEEHTARNGEVVGVEPRPGGQNDSQQGQLEENNNRFISVDEDSSGNQEEQEEDEEHAGEQDEEDEEEEEMDQESDDFDQSDDSSREDEHTHTNSVTNSSSIVDLPVHQLSSPFYTKTTKMKRKLDHGSEVRSFSLGKKPCKVSEYTSTTGLVPCSATPTTFGDLRAANGQGQQRRRITSVQPPTGLQEWLKMFQSWSGPEKLLALDELIDSCEPTQVKHMMQVIEPQFQRDFISLLPKELALYVLSFLEPKDLLQAAQTCRYWRILAEDNLLWREKCKEEGIDEPLHIKRRKVIKPGFIHSPWKSAYIRQHRIDTNSRRGGSGSGSGSGSGSDIVLTQSPASLAVSLGQRATISCRASESVDNYGFSFMNWFQQKPGQPPKLLIYATSNRGSGVPARFSGSGSGTDFSLNIHPVEEDDSAMYFCQQTKEVPWTFGGGTKLEIKRGGGGSGGGDSGGGGSEVKLVESGGDLVKPGGSLKLSCAASGFTFSHYGMSWVRQTPDKRLEWVATIGSRGTYTHYPDSVKGRFTISRDNDKNALYLQMNSLRTEDTAMYYCARKSEFYYYGNTYYYSAMDYWGQGASVTVSS

SEQ ID NO: 198 - protein, 633 aa, synthetic construct
  source 1..633: note = HA-FBXW7a-(GS)1-3DX.2 peptide
MYPYDVPDYANQELLSVGSKRRRTGGSLRGNPSSSQVDEEQMNRVVEEEQQQQLRQQEEEHTARNGEVVGVEPRPGGQNDSQQGQLEENNNRFISVDEDSSGNQEEQEEDEEHAGEQDEEDEEEEEMDQESDDFDQSDDSSREDEHTHTNSVTNSSSIVDLPVHQLSSPFYTKTTKMKRKLDHGSEVRSFSLGKKPCKVSEYTSTTGLVPCSATPTTFGDLRAANGQGQQRRRITSVQPPTGLQEWLKMFQSWSGPEKLLALDELIDSCEPTQVKHMMQVIEPQFQRDFISLLPKELALYVLSFLEPKDLLQAAQTCRYWRILAEDNLLWREKCKEEGIDEPLHIKRRKVIKPGFIHSPWKSAYIRQHRIDTNSRRGGSDIVLTQSPASLAVSLGQRATISCRASESVDNYGFSFMNWFQQKPGQPPKLLIYATSNRGSGVPARFSGSGSGTDFSLNIHPVEEDDSAMYFCQQTKEVPWTFGGGTKLEIKRGGGGSGGGDSGGGGSEVKLVESGGDLVKPGGSLKLSCAASGFTFSHYGMSWVRQTPDKRLEWVATIGSRGTYTHYPDSVKGRFTISRDNDKNALYLQMNSLRTEDTAMYYCARKSEFYYYGNTYYYSAMDYWGQGASVTVSS

SEQ ID NO: 199 - protein, 635 aa, synthetic construct
  source 1..635: note = HA-FBXW7a-(GS)2-3DX.2 peptide
MYPYDVPDYANQELLSVGSKRRRTGGSLRGNPSSSQVDEEQMNRVVEEEQQQQLRQQEEEHTARNGEVVGVEPRPGGQNDSQQGQLEENNNRFISVDEDSSGNQEEQEEDEEHAGEQDEEDEEEEEMDQESDDFDQSDDSSREDEHTHTNSVTNSSSIVDLPVHQLSSPFYTKTTKMKRKLDHGSEVRSFSLGKKPCKVSEYTSTTGLVPCSATPTTFGDLRAANGQGQQRRRITSVQPPTGLQEWLKMFQSWSGPEKLLALDELIDSCEPTQVKHMMQVIEPQFQRDFISLLPKELALYVLSFLEPKDLLQAAQTCRYWRILAEDNLLWREKCKEEGIDEPLHIKRRKVIKPGFIHSPWKSAYIRQHRIDTNSRRGGSGSDIVLTQSPASLAVSLGQRATISCRASESVDNYGFSFMNWFQQKPGQPPKLLIYATSNRGSGVPARFSGSGSGTDFSLNIHPVEEDDSAMYFCQQTKEVPWTFGGGTKLEIKRGGGGSGGGDSGGGGSEVKLVESGGDLVKPGGSLKLSCAASGFTFSHYGMSWVRQTPDKRLEWVATIGSRGTYTHYPDSVKGRFTISRDNDKNALYLQMNSLRTEDTAMYYCARKSEFYYYGNTYYYSAMDYWGQGASVTVSS

SEQ ID NO: 200 - protein, 637 aa, synthetic construct
  source 1..637: note = HA-FBXW7a-(GS)3-3DX.2 peptide
MYPYDVPDYANQELLSVGSKRRRTGGSLRGNPSSSQVDEEQMNRVVEEEQQQQLRQQEEEHTARNGEVVGVEPRPGGQNDSQQGQLEENNNRFISVDEDSSGNQEEQEEDEEHAGEQDEEDEEEEEMDQESDDFDQSDDSSREDEHTHTNSVTNSSSIVDLPVHQLSSPFYTKTTKMKRKLDHGSEVRSFSLGKKPCKVSEYTSTTGLVPCSATPTTFGDLRAANGQGQQRRRITSVQPPTGLQEWLKMFQSWSGPEKLLALDELIDSCEPTQVKHMMQVIEPQFQRDFISLLPKELALYVLSFLEPKDLLQAAQTCRYWRILAEDNLLWREKCKEEGIDEPLHIKRRKVIKPGFIHSPWKSAYIRQHRIDTNSRRGGSGSGSDIVLTQSPASLAVSLGQRATISCRASESVDNYGFSFMNWFQQKPGQPPKLLIYATSNRGSGVPARFSGSGSGTDFSLNIHPVEEDDSAMYFCQQTKEVPWTFGGGTKLEIKRGGGGSGGGDSGGGGSEVKLVESGGDLVKPGGSLKLSCAASGFTFSHYGMSWVRQTPDKRLEWVATIGSRGTYTHYPDSVKGRFTISRDNDKNALYLQMNSLRTEDTAMYYCARKSEFYYYGNTYYYSAMDYWGQGASVTVSS

SEQ ID NO: 201 - protein, 639 aa, synthetic construct
  source 1..639: note = HA-FBXW7a-(GS)4-3DX.2 peptide
MYPYDVPDYANQELLSVGSKRRRTGGSLRGNPSSSQVDEEQMNRVVEEEQQQQLRQQEEEHTARNGEVVGVEPRPGGQNDSQQGQLEENNNRFISVDEDSSGNQEEQEEDEEHAGEQDEEDEEEEEMDQESDDFDQSDDSSREDEHTHTNSVTNSSSIVDLPVHQLSSPFYTKTTKMKRKLDHGSEVRSFSLGKKPCKVSEYTSTTGLVPCSATPTTFGDLRAANGQGQQRRRITSVQPPTGLQEWLKMFQSWSGPEKLLALDELIDSCEPTQVKHMMQVIEPQFQRDFISLLPKELALYVLSFLEPKDLLQAAQTCRYWRILAEDNLLWREKCKEEGIDEPLHIKRRKVIKPGFIHSPWKSAYIRQHRIDTNSRRGGSGSGSGSDIVLTQSPASLAVSLGQRATISCRASESVDNYGFSFMNWFQQKPGQPPKLLIYATSNRGSGVPARFSGSGSGTDFSLNIHPVEEDDSAMYFCQQTKEVPWTFGGGTKLEIKRGGGGSGGGDSGGGGSEVKLVESGGDLVKPGGSLKLSCAASGFTFSHYGMSWVRQTPDKRLEWVATIGSRGTYTHYPDSVKGRFTISRDNDKNALYLQMNSLRTEDTAMYYCARKSEFYYYGNTYYYSAMDYWGQGASVTVSS

SEQ ID NO: 202 - protein, 641 aa, synthetic construct
  source 1..641: note = HA-FBXW7a-(GS)5-3DX.2 peptide
MYPYDVPDYANQELLSVGSKRRRTGGSLRGNPSSSQVDEEQMNRVVEEEQQQQLRQQEEEHTARNGEVVGVEPRPGGQNDSQQGQLEENNNRFISVDEDSSGNQEEQEEDEEHAGEQDEEDEEEEEMDQESDDFDQSDDSSREDEHTHTNSVTNSSSIVDLPVHQLSSPFYTKTTKMKRKLDHGSEVRSFSLGKKPCKVSEYTSTTGLVPCSATPTTFGDLRAANGQGQQRRRITSVQPPTGLQEWLKMFQSWSGPEKLLALDELIDSCEPTQVKHMMQVIEPQFQRDFISLLPKELALYVLSFLEPKDLLQAAQTCRYWRILAEDNLLWREKCKEEGIDEPLHIKRRKVIKPGFIHSPWKSAYIRQHRIDTNSRRGGSGSGSGSGSDIVLTQSPASLAVSLGQRATISCRASESVDNYGFSFMNWFQQKPGQPPKLLIYATSNRGSGVPARFSGSGSGTDFSLNIHPVEEDDSAMYFCQQTKEVPWTFGGGTKLEIKRGGGGSGGGDSGGGGSEVKLVESGGDLVKPGGSLKLSCAASGFTFSHYGMSWVRQTPDKRLEWVATIGSRGTYTHYPDSVKGRFTISRDNDKNALYLQMNSLRTEDTAMYYCARKSEFYYYGNTYYYSAMDYWGQGASVTVSS

SEQ ID NO: 203 - protein, 643 aa, synthetic construct
  source 1..643: note = HA-FBXW7a-(GS)6-3DX.2 peptide
MYPYDVPDYANQELLSVGSKRRRTGGSLRGNPSSSQVDEEQMNRVVEEEQQQQLRQQEEEHTARNGEVVGVEPRPGGQNDSQQGQLEENNNRFISVDEDSSGNQEEQEEDEEHAGEQDEEDEEEEEMDQESDDFDQSDDSSREDEHTHTNSVTNSSSIVDLPVHQLSSPFYTKTTKMKRKLDHGSEVRSFSLGKKPCKVSEYTSTTGLVPCSATPTTFGDLRAANGQGQQRRRITSVQPPTGLQEWLKMFQSWSGPEKLLALDELIDSCEPTQVKHMMQVIEPQFQRDFISLLPKELALYVLSFLEPKDLLQAAQTCRYWRILAEDNLLWREKCKEEGIDEPLHIKRRKVIKPGFIHSPWKSAYIRQHRIDTNSRRGGSGSGSGSGSGSDIVLTQSPASLAVSLGQRATISCRASESVDNYGFSFMNWFQQKPGQPPKLLIYATSNRGSGVPARFSGSGSGTDFSLNIHPVEEDDSAMYFCQQTKEVPWTFGGGTKLEIKRGGGGSGGGDSGGGGSEVKLVESGGDLVKPGGSLKLSCAASGFTFSHYGMSWVRQTPDKRLEWVATIGSRGTYTHYPDSVKGRFTISRDNDKNALYLQMNSLRTEDTAMYYCARKSEFYYYGNTYYYSAMDYWGQGASVTVSS

SEQ ID NO: 204 - protein, 592 aa, synthetic construct
  source 1..592: note = NLS-Keap1-(GS)1-3DX.2 peptide
PAAKRVKLDGSGSGSQPDPRPSGAGACCRFLPLQSQCPEGAGDAVMYASTECKAEVTPSQHGNRTFSYTLEDHTKQAFGIMNELRLSQQLCDVTLQVKYQDAPAAQFMAHKVVLASSSPVFKAMFTNGLREQGMEVVSIEGIHPKVMERLIEFAYTASISMGEKCVLHVMNGAVMYQIDSVVRACSDFLVQQLDPSNAIGIANFAEQIGCVELHQRAREYIYMHFGEVAKQEEFFNLSHCQLVTLISRDDLNVRCESEVFHACINWVKYDCEQRRFYVQALLRAVRCHSLTPNFLQMQLQKCEILQSDSRCKDYLVKIFEELTLHKPTQVMPCRAPGSDIVLTQSPASLAVSLGQRATISCRASESVDNYGFSFMNWFQQKPGQPPKLLIYATSNRGSGVPARFSGSGSGTDFSLNIHPVEEDDSAMYFCQQTKEVPWTFGGGTKLEIKRGGGGSGGGDSGGGGSEVKLVESGGDLVKPGGSLKLSCAASGFTFSHYGMSWVRQTPDKRLEWVATIGSRGTYTHYPDSVKGRFTISRDNDKNALYLQMNSLRTEDTAMYYCARKSEFYYYGNTYYYSAMDYWGQGASVTVSS

SEQ ID NO: 205 - protein, 594 aa, synthetic construct
  source 1..594: note = NLS-Keap1-(GS)2-3DX.2 peptide
PAAKRVKLDGSGSGSQPDPRPSGAGACCRFLPLQSQCPEGAGDAVMYASTECKAEVTPSQHGNRTFSYTLEDHTKQAFGIMNELRLSQQLCDVTLQVKYQDAPAAQFMAHKVVLASSSPVFKAMFTNGLREQGMEVVSIEGIHPKVMERLIEFAYTASISMGEKCVLHVMNGAVMYQIDSVVRACSDFLVQQLDPSNAIGIANFAEQIGCVELHQRAREYIYMHFGEVAKQEEFFNLSHCQLVTLISRDDLNVRCESEVFHACINWVKYDCEQRRFYVQALLRAVRCHSLTPNFLQMQLQKCEILQSDSRCKDYLVKIFEELTLHKPTQVMPCRAPGSGSDIVLTQSPASLAVSLGQRATISCRASESVDNYGFSFMNWFQQKPGQPPKLLIYATSNRGSGVPARFSGSGSGTDFSLNIHPVEEDDSAMYFCQQTKEVPWTFGGGTKLEIKRGGGGSGGGDSGGGGSEVKLVESGGDLVKPGGSLKLSCAASGFTFSHYGMSWVRQTPDKRLEWVATIGSRGTYTHYPDSVKGRFTISRDNDKNALYLQMNSLRTEDTAMYYCARKSEFYYYGNTYYYSAMDYWGQGASVTVSS

SEQ ID NO: 206 - protein, 596 aa, synthetic construct
  source 1..596: note = NLS-Keap1-(GS)3-3DX.2 peptide
PAAKRVKLDGSGSGSQPDPRPSGAGACCRFLPLQSQCPEGAGDAVMYASTECKAEVTPSQHGNRTFSYTLEDHTKQAFGIMNELRLSQQLCDVTLQVKYQDAPAAQFMAHKVVLASSSPVFKAMFTNGLREQGMEVVSIEGIHPKVMERLIEFAYTASISMGEKCVLHVMNGAVMYQIDSVVRACSDFLVQQLDPSNAIGIANFAEQIGCVELHQRAREYIYMHFGEVAKQEEFFNLSHCQLVTLISRDDLNVRCESEVFHACINWVKYDCEQRRFYVQALLRAVRCHSLTPNFLQMQLQKCEILQSDSRCKDYLVKIFEELTLHKPTQVMPCRAPGSGSGSDIVLTQSPASLAVSLGQRATISCRASESVDNYGFSFMNWFQQKPGQPPKLLIYATSNRGSGVPARFSGSGSGTDFSLNIHPVEEDDSAMYFCQQTKEVPWTFGGGTKLEIKRGGGGSGGGDSGGGGSEVKLVESGGDLVKPGGSLKLSCAASGFTFSHYGMSWVRQTPDKRLEWVATIGSRGTYTHYPDSVKGRFTISRDNDKNALYLQMNSLRTEDTAMYYCARKSEFYYYGNTYYYSAMDYWGQGASVTVSS

SEQ ID NO: 207 - protein, 598 aa, synthetic construct
  source 1..598: note = NLS-Keap1-(GS)4-3DX.2 peptide
PAAKRVKLDGSGSGSQPDPRPSGAGACCRFLPLQSQCPEGAGDAVMYASTECKAEVTPSQHGNRTFSYTLEDHTKQAFGIMNELRLSQQLCDVTLQVKYQDAPAAQFMAHKVVLASSSPVFKAMFTNGLREQGMEVVSIEGIHPKVMERLIEFAYTASISMGEKCVLHVMNGAVMYQIDSVVRACSDFLVQQLDPSNAIGIANFAEQIGCVELHQRAREYIYMHFGEVAKQEEFFNLSHCQLVTLISRDDLNVRCESEVFHACINWVKYDCEQRRFYVQALLRAVRCHSLTPNFLQMQLQKCEILQSDSRCKDYLVKIFEELTLHKPTQVMPCRAPGSGSGSGSDIVLTQSPASLAVSLGQRATISCRASESVDNYGFSFMNWFQQKPGQPPKLLIYATSNRGSGVPARFSGSGSGTDFSLNIHPVEEDDSAMYFCQQTKEVPWTFGGGTKLEIKRGGGGSGGGDSGGGGSEVKLVESGGDLVKPGGSLKLSCAASGFTFSHYGMSWVRQTPDKRLEWVATIGSRGTYTHYPDSVKGRFTISRDNDKNALYLQMNSLRTEDTAMYYCARKSEFYYYGNTYYYSAMDYWGQGASVTVSS

SEQ ID NO: 208 - protein, 600 aa, synthetic construct
  source 1..600: note = NLS-Keap1-(GS)5-3DX.2 peptide
PAAKRVKLDGSGSGSQPDPRPSGAGACCRFLPLQSQCPEGAGDAVMYASTECKAEVTPSQHGNRTFSYTLEDHTKQAFGIMNELRLSQQLCDVTLQVKYQDAPAAQFMAHKVVLASSSPVFKAMFTNGLREQGMEVVSIEGIHPKVMERLIEFAYTASISMGEKCVLHVMNGAVMYQIDSVVRACSDFLVQQLDPSNAIGIANFAEQIGCVELHQRAREYIYMHFGEVAKQEEFFNLSHCQLVTLISRDDLNVRCESEVFHACINWVKYDCEQRRFYVQALLRAVRCHSLTPNFLQMQLQKCEILQSDSRCKDYLVKIFEELTLHKPTQVMPCRAPGSGSGSGSGSDIVLTQSPASLAVSLGQRATISCRASESVDNYGFSFMNWFQQKPGQPPKLLIYATSNRGSGVPARFSGSGSGTDFSLNIHPVEEDDSAMYFCQQTKEVPWTFGGGTKLEIKRGGGGSGGGDSGGGGSEVKLVESGGDLVKPGGSLKLSCAASGFTFSHYGMSWVRQTPDKRLEWVATIGSRGTYTHYPDSVKGRFTISRDNDKNALYLQMNSLRTEDTAMYYCARKSEFYYYGNTYYYSAMDYWGQGASVTVSS

SEQ ID NO: 209 - protein, 602 aa, synthetic construct
  source 1..602: note = NLS-Keap1-(GS)6-3DX.2 peptide
PAAKRVKLDGSGSGSQPDPRPSGAGACCRFLPLQSQCPEGAGDAVMYASTECKAEVTPSQHGNRTFSYTLEDHTKQAFGIMNELRLSQQLCDVTLQVKYQDAPAAQFMAHKVVLASSSPVFKAMFTNGLREQGMEVVSIEGIHPKVMERLIEFAYTASISMGEKCVLHVMNGAVMYQIDSVVRACSDFLVQQLDPSNAIGIANFAEQIGCVELHQRAREYIYMHFGEVAKQEEFFNLSHCQLVTLISRDDLNVRCESEVFHACINWVKYDCEQRRFYVQALLRAVRCHSLTPNFLQMQLQKCEILQSDSRCKDYLVKIFEELTLHKPTQVMPCRAPGSGSGSGSGSGSDIVLTQSPASLAVSLGQRATISCRASESVDNYGFSFMNWFQQKPGQPPKLLIYATSNRGSGVPARFSGSGSGTDFSLNIHPVEEDDSAMYFCQQTKEVPWTFGGGTKLEIKRGGGGSGGGDSGGGGSEVKLVESGGDLVKPGGSLKLSCAASGFTFSHYGMSWVRQTPDKRLEWVATIGSRGTYTHYPDSVKGRFTISRDNDKNALYLQMNSLRTEDTAMYYCARKSEFYYYGNTYYYSAMDYWGQGASVTVSS

SEQ ID NO: 210 - protein, 602 aa, synthetic construct
  source 1..602: note = HA-NLS-Keap1-(GS)1-3DX.2 peptide
MYPYDVPDYAPAAKRVKLDGSGSGSQPDPRPSGAGACCRFLPLQSQCPEGAGDAVMYASTECKAEVTPSQHGNRTFSYTLEDHTKQAFGIMNELRLSQQLCDVTLQVKYQDAPAAQFMAHKVVLASSSPVFKAMFTNGLREQGMEVVSIEGIHPKVMERLIEFAYTASISMGEKCVLHVMNGAVMYQIDSVVRACSDFLVQQLDPSNAIGIANFAEQIGCVELHQRAREYIYMHFGEVAKQEEFFNLSHCQLVTLISRDDLNVRCESEVFHACINWVKYDCEQRRFYVQALLRAVRCHSLTPNFLQMQLQKCEILQSDSRCKDYLVKIFEELTLHKPTQVMPCRAPGSDIVLTQSPASLAVSLGQRATISCRASESVDNYGFSFMNWFQQKPGQPPKLLIYATSNRGSGVPARFSGSGSGTDFSLNIHPVEEDDSAMYFCQQTKEVPWTFGGGTKLEIKRGGGGSGGGDSGGGGSEVKLVESGGDLVKPGGSLKLSCAASGFTFSHYGMSWVRQTPDKRLEWVATIGSRGTYTHYPDSVKGRFTISRDNDKNALYLQMNSLRTEDTAMYYCARKSEFYYYGNTYYYSAMDYWGQGASVTVSS

SEQ ID NO: 211 - protein, 604 aa, synthetic construct
  source 1..604: note = HA-NLS-Keap1-(GS)2-3DX.2 peptide
MYPYDVPDYAPAAKRVKLDGSGSGSQPDPRPSGAGACCRFLPLQSQCPEGAGDAVMYASTECKAEVTPSQHGNRTFSYTLEDHTKQAFGIMNELRLSQQLCDVTLQVKYQDAPAAQFMAHKVVLASSSPVFKAMFTNGLREQGMEVVSIEGIHPKVMERLIEFAYTASISMGEKCVLHVMNGAVMYQIDSVVRACSDFLVQQLDPSNAIGIANFAEQIGCVELHQRAREYIYMHFGEVAKQEEFFNLSHCQLVTLISRDDLNVRCESEVFHACINWVKYDCEQRRFYVQALLRAVRCHSLTPNFLQMQLQKCEILQSDSRCKDYLVKIFEELTLHKPTQVMPCRAPGSGSDIVLTQSPASLAVSLGQRATISCRASESVDNYGFSFMNWFQQKPGQPPKLLIYATSNRGSGVPARFSGSGSGTDFSLNIHPVEEDDSAMYFCQQTKEVPWTFGGGTKLEIKRGGGGSGGGDSGGGGSEVKLVESGGDLVKPGGSLKLSCAASGFTFSHYGMSWVRQTPDKRLEWVATIGSRGTYTHYPDSVKGRFTISRDNDKNALYLQMNSLRTEDTAMYYCARKSEFYYYGNTYYYSAMDYWGQGASVTVSS

SEQ ID NO: 212 - protein, 606 aa, synthetic construct
  source 1..606: note = HA-NLS-Keap1-(GS)3-3DX.2 peptide
MYPYDVPDYAPAAKRVKLDGSGSGSQPDPRPSGAGACCRFLPLQSQCPEGAGDAVMYASTECKAEVTPSQHGNRTFSYTLEDHTKQAFGIMNELRLSQQLCDVTLQVKYQDAPAAQFMAHKVVLASSSPVFKAMFTNGLREQGMEVVSIEGIHPKVMERLIEFAYTASISMGEKCVLHVMNGAVMYQIDSVVRACSDFLVQQLDPSNAIGIANFAEQIGCVELHQRAREYIYMHFGEVAKQEEFFNLSHCQLVTLISRDDLNVRCESEVFHACINWVKYDCEQRRFYVQALLRAVRCHSLTPNFLQMQLQKCEILQSDSRCKDYLVKIFEELTLHKPTQVMPCRAPGSGSGSDIVLTQSPASLAVSLGQRATISCRASESVDNYGFSFMNWFQQKPGQPPKLLIYATSNRGSGVPARFSGSGSGTDFSLNIHPVEEDDSAMYFCQQTKEVPWTFGGGTKLEIKRGGGGSGGGDSGGGGSEVKLVESGGDLVKPGGSLKLSCAASGFTFSHYGMSWVRQTPDKRLEWVATIGSRGTYTHYPDSVKGRFTISRDNDKNALYLQMNSLRTEDTAMYYCARKSEFYYYGNTYYYSAMDYWGQGASVTVSS

SEQ ID NO: 213 - protein, 608 aa, synthetic construct
  source 1..608: note = HA-NLS-Keap1-(GS)4-3DX.2 peptide
MYPYDVPDYAPAAKRVKLDGSGSGSQPDPRPSGAGACCRFLPLQSQCPEGAGDAVMYASTECKAEVTPSQHGNRTFSYTLEDHTKQAFGIMNELRLSQQLCDVTLQVKYQDAPAAQFMAHKVVLASSSPVFKAMFTNGLREQGMEVVSIEGIHPKVMERLIEFAYTASISMGEKCVLHVMNGAVMYQIDSVVRACSDFLVQQLDPSNAIGIANFAEQIGCVELHQRAREYIYMHFGEVAKQEEFFNLSHCQLVTLISRDDLNVRCESEVFHACINWVKYDCEQRRFYVQALLRAVRCHSLTPNFLQMQLQKCEILQSDSRCKDYLVKIFEELTLHKPTQVMPCRAPGSGSGSGSDIVLTQSPASLAVSLGQRATISCRASESVDNYGFSFMNWFQQKPGQPPKLLIYATSNRGSGVPARFSGSGSGTDFSLNIHPVEEDDSAMYFCQQTKEVPWTFGGGTKLEIKRGGGGSGGGDSGGGGSEVKLVESGGDLVKPGGSLKLSCAASGFTFSHYGMSWVRQTPDKRLEWVATIGSRGTYTHYPDSVKGRFTISRDNDKNALYLQMNSLRTEDTAMYYCARKSEFYYYGNTYYYSAMDYWGQGASVTVSS

SEQ ID NO: 214 - protein, 610 aa, synthetic construct
  source 1..610: note = HA-NLS-Keap1-(GS)5-3DX.2 peptide
MYPYDVPDYAPAAKRVKLDGSGSGSQPDPRPSGAGACCRFLPLQSQCPEGAGDAVMYASTECKAEVTPSQHGNRTFSYTLEDHTKQAFGIMNELRLSQQLCDVTLQVKYQDAPAAQFMAHKVVLASSSPVFKAMFTNGLREQGMEVVSIEGIHPKVMERLIEFAYTASISMGEKCVLHVMNGAVMYQIDSVVRACSDFLVQQLDPSNAIGIANFAEQIGCVELHQRAREYIYMHFGEVAKQEEFFNLSHCQLVTLISRDDLNVRCESEVFHACINWVKYDCEQRRFYVQALLRAVRCHSLTPNFLQMQLQKCEILQSDSRCKDYLVKIFEELTLHKPTQVMPCRAPGSGSGSGSGSDIVLTQSPASLAVSLGQRATISCRASESVDNYGFSFMNWFQQKPGQPPKLLIYATSNRGSGVPARFSGSGSGTDFSLNIHPVEEDDSAMYFCQQTKEVPWTFGGGTKLEIKRGGGGSGGGDSGGGGSEVKLVESGGDLVKPGGSLKLSCAASGFTFSHYGMSWVRQTPDKRLEWVATIGSRGTYTHYPDSVKGRFTISRDNDKNALYLQMNSLRTEDTAMYYCARKSEFYYYGNTYYYSAMDYWGQGASVTVSS

SEQ ID NO: 215 - protein, 612 aa, synthetic construct
  source 1..612: note = HA-NLS-Keap1-(GS)6-3DX.2 peptide
MYPYDVPDYAPAAKRVKLDGSGSGSQPDPRPSGAGACCRFLPLQSQCPEGAGDAVMYASTECKAEVTPSQHGNRTFSYTLEDHTKQAFGIMNELRLSQQLCDVTLQVKYQDAPAAQFMAHKVVLASSSPVFKAMFTNGLREQGMEVVSIEGIHPKVMERLIEFAYTASISMGEKCVLHVMNGAVMYQIDSVVRACSDFLVQQLDPSNAIGIANFAEQIGCVELHQRAREYIYMHFGEVAKQEEFFNLSHCQLVTLISRDDLNVRCESEVFHACINWVKYDCEQRRFYVQALLRAVRCHSLTPNFLQMQLQKCEILQSDSRCKDYLVKIFEELTLHKPTQVMPCRAPGSGSGSGSGSGSDIVLTQSPASLAVSLGQRATISCRASESVDNYGFSFMNWFQQKPGQPPKLLIYATSNRGSGVPARFSGSGSGTDFSLNIHPVEEDDSAMYFCQQTKEVPWTFGGGTKLEIKRGGGGSGGGDSGGGGSEVKLVESGGDLVKPGGSLKLSCAASGFTFSHYGMSWVRQTPDKRLEWVATIGSRGTYTHYPDSVKGRFTISRDNDKNALYLQMNSLRTEDTAMYYCARKSEFYYYGNTYYYSAMDYWGQGASVTVSS

SEQ ID NO: 216 - protein, 398 aa, synthetic construct
  source 1..398: note = NLS-RNF125-(GS)1-3DX.2 peptide
PAAKRVKLDGSGSGSGSVLSTDSGKSAPASATARALERRRDPELPVTSFDCAVCLEVLHQPVRTRCGHVFCRSCIATSLKNNKWTCPYCRAYLPSEGVPATDVAKRMKSEYKNCAECDTLVCLSEMRAHIRTCQKYIDKYGPGSDIVLTQSPASLAVSLGQRATISCRASESVDNYGFSFMNWFQQKPGQPPKLLIYATSNRGSGVPARFSGSGSGTDFSLNIHPVEEDDSAMYFCQQTKEVPWTFGGGTKLEIKRGGGGSGGGDSGGGGSEVKLVESGGDLVKPGGSLKLSCAASGFTFSHYGMSWVRQTPDKRLEWVATIGSRGTYTHYPDSVKGRFTISRDNDKNALYLQMNSLRTEDTAMYYCARKSEFYYYGNTYYYSAMDYWGQGASVTVSS

SEQ ID NO: 217 - protein, 400 aa, synthetic construct
  source 1..400: note = NLS-RNF125-(GS)2-3DX.2 peptide
PAAKRVKLDGSGSGSGSVLSTDSGKSAPASATARALERRRDPELPVTSFDCAVCLEVLHQPVRTRCGHVFCRSCIATSLKNNKWTCPYCRAYLPSEGVPATDVAKRMKSEYKNCAECDTLVCLSEMRAHIRTCQKYIDKYGPGSGSDIVLTQSPASLAVSLGQRATISCRASESVDNYGFSFMNWFQQKPGQPPKLLIYATSNRGSGVPARFSGSGSGTDFSLNIHPVEEDDSAMYFCQQTKEVPWTFGGGTKLEIKRGGGGSGGGDSGGGGSEVKLVESGGDLVKPGGSLKLSCAASGFTFSHYGMSWVRQTPDKRLEWVATIGSRGTYTHYPDSVKGRFTISRDNDKNALYLQMNSLRTEDTAMYYCARKSEFYYYGNTYYYSAMDYWGQGASVTVSS

SEQ ID NO: 218 - protein, 402 aa, synthetic construct
  source 1..402: note = NLS-RNF125-(GS)3-3DX.2 peptide
PAAKRVKLDGSGSGSGSVLSTDSGKSAPASATARALERRRDPELPVTSFDCAVCLEVLHQPVRTRCGHVFCRSCIATSLKNNKWTCPYCRAYLPSEGVPATDVAKRMKSEYKNCAECDTLVCLSEMRAHIRTCQKYIDKYGPGSGSGSDIVLTQSPASLAVSLGQRATISCRASESVDNYGFSFMNWFQQKPGQPPKLLIYATSNRGSGVPARFSGSGSGTDFSLNIHPVEEDDSAMYFCQQTKEVPWTFGGGTKLEIKRGGGGSGGGDSGGGGSEVKLVESGGDLVKPGGSLKLSCAASGFTFSHYGMSWVRQTPDKRLEWVATIGSRGTYTHYPDSVKGRFTISRDNDKNALYLQMNSLRTEDTAMYYCARKSEFYYYGNTYYYSAMDYWGQGASVTVSS

SEQ ID NO: 219 - protein, 404 aa, synthetic construct
  source 1..404: note = NLS-RNF125-(GS)4-3DX.2 peptide
PAAKRVKLDGSGSGSGSVLSTDSGKSAPASATARALERRRDPELPVTSFDCAVCLEVLHQPVRTRCGHVFCRSCIATSLKNNKWTCPYCRAYLPSEGVPATDVAKRMKSEYKNCAECDTLVCLSEMRAHIRTCQKYIDKYGPGSGSGSGSDIVLTQSPASLAVSLGQRATISCRASESVDNYGFSFMNWFQQKPGQPPKLLIYATSNRGSGVPARFSGSGSGTDFSLNIHPVEEDDSAMYFCQQTKEVPWTFGGGTKLEIKRGGGGSGGGDSGGGGSEVKLVESGGDLVKPGGSLKLSCAASGFTFSHYGMSWVRQTPDKRLEWVATIGSRGTYTHYPDSVKGRFTISRDNDKNALYLQMNSLRTEDTAMYYCARKSEFYYYGNTYYYSAMDYWGQGASVTVSS

SEQ ID NO: 220 - protein, 406 aa, synthetic construct
  source 1..406: note = NLS-RNF125-(GS)5-3DX.2 peptide
PAAKRVKLDGSGSGSGSVLSTDSGKSAPASATARALERRRDPELPVTSFDCAVCLEVLHQPVRTRCGHVFCRSCIATSLKNNKWTCPYCRAYLPSEGVPATDVAKRMKSEYKNCAECDTLVCLSEMRAHIRTCQKYIDKYGPGSGSGSGSGSDIVLTQSPASLAVSLGQRATISCRASESVDNYGFSFMNWFQQKPGQPPKLLIYATSNRGSGVPARFSGSGSGTDFSLNIHPVEEDDSAMYFCQQTKEVPWTFGGGTKLEIKRGGGGSGGGDSGGGGSEVKLVESGGDLVKPGGSLKLSCAASGFTFSHYGMSWVRQTPDKRLEWVATIGSRGTYTHYPDSVKGRFTISRDNDKNALYLQMNSLRTEDTAMYYCARKSEFYYYGNTYYYSAMDYWGQGASVTVSS

SEQ ID NO: 221 - protein, 408 aa, synthetic construct
  source 1..408: note = NLS-RNF125-(GS)6-3DX.2 peptide
PAAKRVKLDGSGSGSGSVLSTDSGKSAPASATARALERRRDPELPVTSFDCAVCLEVLHQPVRTRCGHVFCRSCIATSLKNNKWTCPYCRAYLPSEGVPATDVAKRMKSEYKNCAECDTLVCLSEMRAHIRTCQKYIDKYGPGSGSGSGSGSGSDIVLTQSPASLAVSLGQRATISCRASESVDNYGFSFMNWFQQKPGQPPKLLIYATSNRGSGVPARFSGSGSGTDFSLNIHPVEEDDSAMYFCQQTKEVPWTFGGGTKLEIKRGGGGSGGGDSGGGGSEVKLVESGGDLVKPGGSLKLSCAASGFTFSHYGMSWVRQTPDKRLEWVATIGSRGTYTHYPDSVKGRFTISRDNDKNALYLQMNSLRTEDTAMYYCARKSEFYYYGNTYYYSAMDYWGQGASVTVSS

SEQ ID NO: 222 - protein, 408 aa, synthetic construct
  source 1..408: note = HA-NLS-RNF125-(GS)1-3DX.2 peptide
MYPYDVPDYAPAAKRVKLDGSGSGSGSVLSTDSGKSAPASATARALERRRDPELPVTSFDCAVCLEVLHQPVRTRCGHVFCRSCIATSLKNNKWTCPYCRAYLPSEGVPATDVAKRMKSEYKNCAECDTLVCLSEMRAHIRTCQKYIDKYGPGSDIVLTQSPASLAVSLGQRATISCRASESVDNYGFSFMNWFQQKPGQPPKLLIYATSNRGSGVPARFSGSGSGTDFSLNIHPVEEDDSAMYFCQQTKEVPWTFGGGTKLEIKRGGGGSGGGDSGGGGSEVKLVESGGDLVKPGGSLKLSCAASGFTFSHYGMSWVRQTPDKRLEWVATIGSRGTYTHYPDSVKGRFTISRDNDKNALYLQMNSLRTEDTAMYYCARKSEFYYYGNTYYYSAMDYWGQGASVTVSS

SEQ ID NO: 223 - protein, 410 aa, synthetic construct
  source 1..410: note = HA-NLS-RNF125-(GS)2-3DX.2 peptide
MYPYDVPDYAPAAKRVKLDGSGSGSGSVLSTDSGKSAPASATARALERRRDPELPVTSFDCAVCLEVLHQPVRTRCGHVFCRSCIATSLKNNKWTCPYCRAYLPSEGVPATDVAKRMKSEYKNCAECDTLVCLSEMRAHIRTCQKYIDKYGPGSGSDIVLTQSPASLAVSLGQRATISCRASESVDNYGFSFMNWFQQKPGQPPKLLIYATSNRGSGVPARFSGSGSGTDFSLNIHPVEEDDSAMYFCQQTKEVPWTFGGGTKLEIKRGGGGSGGGDSGGGGSEVKLVESGGDLVKPGGSLKLSCAASGFTFSHYGMSWVRQTPDKRLEWVATIGSRGTYTHYPDSVKGRFTISRDNDKNALYLQMNSLRTEDTAMYYCARKSEFYYYGNTYYYSAMDYWGQGASVTVSS

SEQ ID NO: 224 - protein, 412 aa, synthetic construct
  source 1..412: note = HA-NLS-RNF125-(GS)3-3DX.2 peptide
MYPYDVPDYAPAAKRVKLDGSGSGSGSVLSTDSGKSAPASATARALERRRDPELPVTSFDCAVCLEVLHQPVRTRCGHVFCRSCIATSLKNNKWTCPYCRAYLPSEGVPATDVAKRMKSEYKNCAECDTLVCLSEMRAHIRTCQKYIDKYGPGSGSGSDIVLTQSPASLAVSLGQRATISCRASESVDNYGFSFMNWFQQKPGQPPKLLIYATSNRGSGVPARFSGSGSGTDFSLNIHPVEEDDSAMYFCQQTKEVPWTFGGGTKLEIKRGGGGSGGGDSGGGGSEVKLVESGGDLVKPGGSLKLSCAASGFTFSHYGMSWVRQTPDKRLEWVATIGSRGTYTHYPDSVKGRFTISRDNDKNALYLQMNSLRTEDTAMYYCARKSEFYYYGNTYYYSAMDYWGQGASVTVSS

SEQ ID NO: 225 - protein, 414 aa, synthetic construct
  source 1..414: note = HA-NLS-RNF125-(GS)4-3DX.2 peptide
MYPYDVPDYAPAAKRVKLDGSGSGSGSVLSTDSGKSAPASATARALERRRDPELPVTSFDCAVCLEVLHQPVRTRCGHVFCRSCIATSLKNNKWTCPYCRAYLPSEGVPATDVAKRMKSEYKNCAECDTLVCLSEMRAHIRTCQKYIDKYGPGSGSGSGSDIVLTQSPASLAVSLGQRATISCRASESVDNYGFSFMNWFQQKPGQPPKLLIYATSNRGSGVPARFSGSGSGTDFSLNIHPVEEDDSAMYFCQQTKEVPWTFGGGTKLEIKRGGGGSGGGDSGGGGSEVKLVESGGDLVKPGGSLKLSCAASGFTFSHYGMSWVRQTPDKRLEWVATIGSRGTYTHYPDSVKGRFTISRDNDKNALYLQMNSLRTEDTAMYYCARKSEFYYYGNTYYYSAMDYWGQGASVTVSS

SEQ ID NO: 226 - protein, 416 aa, synthetic construct
  source 1..416: note = HA-NLS-RNF125-(GS)5-3DX.2 peptide
MYPYDVPDYAPAAKRVKLDGSGSGSGSVLSTDSGKSAPASATARALERRRDPELPVTSFDCAVCLEVLHQPVRTRCGHVFCRSCIATSLKNNKWTCPYCRAYLPSEGVPATDVAKRMKSEYKNCAECDTLVCLSEMRAHIRTCQKYIDKYGPGSGSGSGSGSDIVLTQSPASLAVSLGQRATISCRASESVDNYGFSFMNWFQQKPGQPPKLLIYATSNRGSGVPARFSGSGSGTDFSLNIHPVEEDDSAMYFCQQTKEVPWTFGGGTKLEIKRGGGGSGGGDSGGGGSEVKLVESGGDLVKPGGSLKLSCAASGFTFSHYGMSWVRQTPDKRLEWVATIGSRGTYTHYPDSVKGRFTISRDNDKNALYLQMNSLRTEDTAMYYCARKSEFYYYGNTYYYSAMDYWGQGASVTVSS

SEQ ID NO: 227 - protein, 418 aa, synthetic construct
  source 1..418: note = HA-NLS-RNF125-(GS)6-3DX.2 peptide
MYPYDVPDYAPAAKRVKLDGSGSGSGSVLSTDSGKSAPASATARALERRRDPELPVTSFDCAVCLEVLHQPVRTRCGHVFCRSCIATSLKNNKWTCPYCRAYLPSEGVPATDVAKRMKSEYKNCAECDTLVCLSEMRAHIRTCQKYIDKYGPGSGSGSGSGSGSDIVLTQSPASLAVSLGQRATISCRASESVDNYGFSFMNWFQQKPGQPPKLLIYATSNRGSGVPARFSGSGSGTDFSLNIHPVEEDDSAMYFCQQTKEVPWTFGGGTKLEIKRGGGGSGGGDSGGGGSEVKLVESGGDLVKPGGSLKLSCAASGFTFSHYGMSWVRQTPDKRLEWVATIGSRGTYTHYPDSVKGRFTISRDNDKNALYLQMNSLRTEDTAMYYCARKSEFYYYGNTYYYSAMDYWGQGASVTVSS

SEQ ID NO: 228 - protein, 498 aa, synthetic construct
  source 1..498: note = 3DX.2-(GS)1-SPOP-NLS peptide
MDIVLTQSPASLAVSLGQRATISCRASESVDNYGFSFMNWFQQKPGQPPKLLIYATSNRGSGVPARFSGSGSGTDFSLNIHPVEEDDSAMYFCQQTKEVPWTFGGGTKLEIKRGGGGSGGGDSGGGGSEVKLVESGGDLVKPGGSLKLSCAASGFTFSHYGMSWVRQTPDKRLEWVATIGSRGTYTHYPDSVKGRFTISRDNDKNALYLQMNSLRTEDTAMYYCARKSEFYYYGNTYYYSAMDYWGQGASVTVSSGSNGLLPDDKLTLFCEVSVVQDSVNISGQNTMNMVKVPECRLADELGGLWENSRFTDCCLCVAGQEFQAHKAILAARSPVFSAMFEHEMEESKKNRVEINDVEPEVFKEMMCFIYTGKAPNLDKMADDLLAAADKYALERLKVMCEDALCSNLSVENAAEILILADLHSADQLKTQAVDFINYHASDVLETSGWKSMVVSHPHLVAEAYRSLASAQCPFLGPPRKRLKQSGSGSPAAKRVKLD

SEQ ID NO: 229 - protein, 500 aa, synthetic construct
  source 1..500: note = 3DX.2-(GS)2-SPOP-NLS peptide
MDIVLTQSPASLAVSLGQRATISCRASESVDNYGFSFMNWFQQKPGQPPKLLIYATSNRGSGVPARFSGSGSGTDFSLNIHPVEEDDSAMYFCQQTKEVPWTFGGGTKLEIKRGGGGSGGGDSGGGGSEVKLVESGGDLVKPGGSLKLSCAASGFTFSHYGMSWVRQTPDKRLEWVATIGSRGTYTHYPDSVKGRFTISRDNDKNALYLQMNSLRTEDTAMYYCARKSEFYYYGNTYYYSAMDYWGQGASVTVSSGSGSNGLLPDDKLTLFCEVSVVQDSVNISGQNTMNMVKVPECRLADELGGLWENSRFTDCCLCVAGQEFQAHKAILAARSPVFSAMFEHEMEESKKNRVEINDVEPEVFKEMMCFIYTGKAPNLDKMADDLLAAADKYALERLKVMCEDALCSNLSVENAAEILILADLHSADQLKTQAVDFINYHASDVLETSGWKSMVVSHPHLVAEAYRSLASAQCPFLGPPRKRLKQSGSGSPAAKRVKLD

SEQ ID NO: 230 - protein, 502 aa, synthetic construct
  source 1..502: note = 3DX.2-(GS)3-SPOP-NLS peptide
MDIVLTQSPASLAVSLGQRATISCRASESVDNYGFSFMNWFQQKPGQPPKLLIYATSNRGSGVPARFSGSGSGTDFSLNIHPVEEDDSAMYFCQQTKEVPWTFGGGTKLEIKRGGGGSGGGDSGGGGSEVKLVESGGDLVKPGGSLKLSCAASGFTFSHYGMSWVRQTPDKRLEWVATIGSRGTYTHYPDSVKGRFTISRDNDKNALYLQMNSLRTEDTAMYYCARKSEFYYYGNTYYYSAMDYWGQGASVTVSSGSGSGSNGLLPDDKLTLFCEVSVVQDSVNISGQNTMNMVKVPECRLADELGGLWENSRFTDCCLCVAGQEFQAHKAILAARSPVFSAMFEHEMEESKKNRVEINDVEPEVFKEMMCFIYTGKAPNLDKMADDLLAAADKYALERLKVMCEDALCSNLSVENAAEILILADLHSADQLKTQAVDFINYHASDVLETSGWKSMVVSHPHLVAEAYRSLASAQCPFLGPPRKRLKQSGSGSPAAKRVKLD

SEQ ID NO: 231 - protein, 504 aa, synthetic construct
  source 1..504: note = 3DX.2-(GS)4-SPOP-NLS peptide
MDIVLTQSPASLAVSLGQRATISCRASESVDNYGFSFMNWFQQKPGQPPKLLIYATSNRGSGVPARFSGSGSGTDFSLNIHPVEEDDSAMYFCQQTKEVPWTFGGGTKLEIKRGGGGSGGGDSGGGGSEVKLVESGGDLVKPGGSLKLSCAASGFTFSHYGMSWVRQTPDKRLEWVATIGSRGTYTHYPDSVKGRFTISRDNDKNALYLQMNSLRTEDTAMYYCARKSEFYYYGNTYYYSAMDYWGQGASVTVSSGSGSGSGSNGLLPDDKLTLFCEVSVVQDSVNISGQNTMNMVKVPECRLADELGGLWENSRFTDCCLCVAGQEFQAHKAILAARSPVFSAMFEHEMEESKKNRVEINDVEPEVFKEMMCFIYTGKAPNLDKMADDLLAAADKYALERLKVMCEDALCSNLSVENAAEILILADLHSADQLKTQAVDFINYHASDVLETSGWKSMVVSHPHLVAEAYRSLASAQCPFLGPPRKRLKQSGSGSPAAKRVKLD

SEQ ID NO: 232 - protein, 507 aa, synthetic construct
  source 1..507: note = 3DX.2-(GS)5-SPOP-NLS peptide
MDIVLTQSPASLAVSLGQRATISCRASESVDNYGFSFMNWFQQKPGQPPKLLIYATSNRGSGVPARFSGSGSGTDFSLNIHPVEEDDSAMYFCQQTKEVPWTFGGGTKLEIKRGGGGSGGGDSGGGGSEVKLVESGGDLVKPGGSLKLSCAASGFTFSHYGMSWVRQTPDKRLEWVATIGSRGTYTHYPDSVKGRFTISRDNDKNALYLQMNSLRTEDTAMYYCARKSEFYYYGNTYYYSAMDYWGQGASVTVSSGSGSGSGSGSNGLLPDDKLTLFCEVSVVQDSVNISGQNTMNMVKVPECRLADELGGLWENSRFTDCCLCVAGQEFQAHKAILAARSPVFSAMFEHEMEESKKNRVEINDVEPEVFKEMMCFIYTGKAPNLDKMADDLLAAADKYALERLKVMCEDALCSNLSVENAAEILILADLHSADQLKTQAVDFINYHASDVLETSGWKSMVVSHPHLVAEAYRSLASAQCPFLGPPRKRLKQSGSGSPAAKRVKLDA

SEQ ID NO: 233 - protein, 508 aa, synthetic construct
  source 1..508: note = 3DX.2-(GS)6-SPOP-NLS peptide
MDIVLTQSPASLAVSLGQRATISCRASESVDNYGFSFMNWFQQKPGQPPKLLIYATSNRGSGVPARFSGSGSGTDFSLNIHPVEEDDSAMYFCQQTKEVPWTFGGGTKLEIKRGGGGSGGGDSGGGGSEVKLVESGGDLVKPGGSLKLSCAASGFTFSHYGMSWVRQTPDKRLEWVATIGSRGTYTHYPDSVKGRFTISRDNDKNALYLQMNSLRTEDTAMYYCARKSEFYYYGNTYYYSAMDYWGQGASVTVSSGSGSGSGSGSGSNGLLPDDKLTLFCEVSVVQDSVNISGQNTMNMVKVPECRLADELGGLWENSRFTDCCLCVAGQEFQAHKAILAARSPVFSAMFEHEMEESKKNRVEINDVEPEVFKEMMCFIYTGKAPNLDKMADDLLAAADKYALERLKVMCEDALCSNLSVENAAEILILADLHSADQLKTQAVDFINYHASDVLETSGWKSMVVSHPHLVAEAYRSLASAQCPFLGPPRKRLKQSGSGSPAAKRVKLD

SEQ ID NO: 234 - protein, 507 aa, synthetic construct
  source 1..507: note = 3DX.2-(GS)1-SPOP-NLS-HA peptide
MDIVLTQSPASLAVSLGQRATISCRASESVDNYGFSFMNWFQQKPGQPPKLLIYATSNRGSGVPARFSGSGSGTDFSLNIHPVEEDDSAMYFCQQTKEVPWTFGGGTKLEIKRGGGGSGGGDSGGGGSEVKLVESGGDLVKPGGSLKLSCAASGFTFSHYGMSWVRQTPDKRLEWVATIGSRGTYTHYPDSVKGRFTISRDNDKNALYLQMNSLRTEDTAMYYCARKSEFYYYGNTYYYSAMDYWGQGASVTVSSGSNGLLPDDKLTLFCEVSVVQDSVNISGQNTMNMVKVPECRLADELGGLWENSRFTDCCLCVAGQEFQAHKAILAARSPVFSAMFEHEMEESKKNRVEINDVEPEVFKEMMCFIYTGKAPNLDKMADDLLAAADKYALERLKVMCEDALCSNLSVENAAEILILADLHSADQLKTQAVDFINYHASDVLETSGWKSMVVSHPHLVAEAYRSLASAQCPFLGPPRKRLKQSGSGSPAAKRVKLDYPYDVPDYA

SEQ ID NO: 235 - protein, 509 aa, synthetic construct
  source 1..509: note = 3DX.2-(GS)2-SPOP-NLS-HA peptide
MDIVLTQSPASLAVSLGQRATISCRASESVDNYGFSFMNWFQQKPGQPPKLLIYATSNRGSGVPARFSGSGSGTDFSLNIHPVEEDDSAMYFCQQTKEVPWTFGGGTKLEIKRGGGGSGGGDSGGGGSEVKLVESGGDLVKPGGSLKLSCAASGFTFSHYGMSWVRQTPDKRLEWVATIGSRGTYTHYPDSVKGRFTISRDNDKNALYLQMNSLRTEDTAMYYCARKSEFYYYGNTYYYSAMDYWGQGASVTVSSGSGSNGLLPDDKLTLFCEVSVVQDSVNISGQNTMNMVKVPECRLADELGGLWENSRFTDCCLCVAGQEFQAHKAILAARSPVFSAMFEHEMEESKKNRVEINDVEPEVFKEMMCFIYTGKAPNLDKMADDLLAAADKYALERLKVMCEDALCSNLSVENAAEILILADLHSADQLKTQAVDFINYHASDVLETSGWKSMVVSHPHLVAEAYRSLASAQCPFLGPPRKRLKQSGSGSPAAKRVKLDYPYDVPDYA

SEQ ID NO: 236 - protein, 511 aa, synthetic construct
  source 1..511: note = 3DX.2-(GS)3-SPOP-NLS-HA peptide
MDIVLTQSPASLAVSLGQRATISCRASESVDNYGFSFMNWFQQKPGQPPKLLIYATSNRGSGVPARFSGSGSGTDFSLNIHPVEEDDSAMYFCQQTKEVPWTFGGGTKLEIKRGGGGSGGGDSGGGGSEVKLVESGGDLVKPGGSLKLSCAASGFTFSHYGMSWVRQTPDKRLEWVATIGSRGTYTHYPDSVKGRFTISRDNDKNALYLQMNSLRTEDTAMYYCARKSEFYYYGNTYYYSAMDYWGQGASVTVSSGSGSGSNGLLPDDKLTLFCEVSVVQDSVNISGQNTMNMVKVPECRLADELGGLWENSRFTDCCLCVAGQEFQAHKAILAARSPVFSAMFEHEMEESKKNRVEINDVEPEVFKEMMCFIYTGKAPNLDKMADDLLAAADKYALERLKVMCEDALCSNLSVENAAEILILADLHSADQLKTQAVDFINYHASDVLETSGWKSMVVSHPHLVAEAYRSLASAQCPFLGPPRKRLKQSGSGSPAAKRVKLDYPYDVPDYA

SEQ ID NO: 237 - protein, 513 aa, synthetic construct
  source 1..513: note = 3DX.2-(GS)4-SPOP-NLS-HA peptide
MDIVLTQSPASLAVSLGQRATISCRASESVDNYGFSFMNWFQQKPGQPPKLLIYATSNRGSGVPARFSGSGSGTDFSLNIHPVEEDDSAMYFCQQTKEVPWTFGGGTKLEIKRGGGGSGGGDSGGGGSEVKLVESGGDLVKPGGSLKLSCAASGFTFSHYGMSWVRQTPDKRLEWVATIGSRGTYTHYPDSVKGRFTISRDNDKNALYLQMNSLRTEDTAMYYCARKSEFYYYGNTYYYSAMDYWGQGASVTVSSGSGSGSGSNGLLPDDKLTLFCEVSVVQDSVNISGQNTMNMVKVPECRLADELGGLWENSRFTDCCLCVAGQEFQAHKAILAARSPVFSAMFEHEMEESKKNRVEINDVEPEVFKEMMCFIYTGKAPNLDKMADDLLAAADKYALERLKVMCEDALCSNLSVENAAEILILADLHSADQLKTQAVDFINYHASDVLETSGWKSMVVSHPHLVAEAYRSLASAQCPFLGPPRKRLKQSGSGSPAAKRVKLDYPYDVPDYA

SEQ ID NO: 238 - protein, 516 aa, synthetic construct
  source 1..516: note = 3DX.2-(GS)5-SPOP-NLS-HA peptide
MDIVLTQSPASLAVSLGQRATISCRASESVDNYGFSFMNWFQQKPGQPPKLLIYATSNRGSGVPARFSGSGSGTDFSLNIHPVEEDDSAMYFCQQTKEVPWTFGGGTKLEIKRGGGGSGGGDSGGGGSEVKLVESGGDLVKPGGSLKLSCAASGFTFSHYGMSWVRQTPDKRLEWVATIGSRGTYTHYPDSVKGRFTISRDNDKNALYLQMNSLRTEDTAMYYCARKSEFYYYGNTYYYSAMDYWGQGASVTVSSGSGSGSGSGSNGLLPDDKLTLFCEVSVVQDSVNISGQNTMNMVKVPECRLADELGGLWENSRFTDCCLCVAGQEFQAHKAILAARSPVFSAMFEHEMEESKKNRVEINDVEPEVFKEMMCFIYTGKAPNLDKMADDLLAAADKYALERLKVMCEDALCSNLSVENAAEILILADLHSADQLKTQAVDFINYHASDVLETSGWKSMVVSHPHLVAEAYRSLASAQCPFLGPPRKRLKQSGSGSPAAKRVKLDYPYDVPDYAA

SEQ ID NO: 239 - protein, 517 aa, synthetic construct
  source 1..517: note = 3DX.2-(GS)6-SPOP-NLS-HA peptide
MDIVLTQSPASLAVSLGQRATISCRASESVDNYGFSFMNWFQQKPGQPPKLLIYATSNRGSGVPARFSGSGSGTDFSLNIHPVEEDDSAMYFCQQTKEVPWTFGGGTKLEIKRGGGGSGGGDSGGGGSEVKLVESGGDLVKPGGSLKLSCAASGFTFSHYGMSWVRQTPDKRLEWVATIGSRGTYTHYPDSVKGRFTISRDNDKNALYLQMNSLRTEDTAMYYCARKSEFYYYGNTYYYSAMDYWGQGASVTVSSGSGSGSGSGSGSNGLLPDDKLTLFCEVSVVQDSVNISGQNTMNMVKVPECRLADELGGLWENSRFTDCCLCVAGQEFQAHKAILAARSPVFSAMFEHEMEESKKNRVEINDVEPEVFKEMMCFIYTGKAPNLDKMADDLLAAADKYALERLKVMCEDALCSNLSVENAAEILILADLHSADQLKTQAVDFINYHASDVLETSGWKSMVVSHPHLVAEAYRSLASAQCPFLGPPRKRLKQSGSGSPAAKRVKLDYPYDVPDYA

SEQ ID NO: 240 - protein, 284 aa, synthetic construct
  source 1..284: note = OMOMYC-(GS)1-CHIP-NLS peptide
MSDTEENVKRRTHNVLERQRRNELKRSFFALRDQIPELENNEKAPKVVILKKATAYILSVQAETQKLISEIDLLRKQNEQLKHKLEQLRNSCAGSRLNFGDDIPSALRIAKKKRWNSIEERRIHQESELHSYLSRLIAAERERELEECQRNHEGDEDDSHVRAQQACIEAKHDKYMADMDELFSQVDEKRKKRDIPDYLCGKISFELMREPCITPSGITYDRKDIEEHLQRVGHFDPVTRSPLTQEQLIPNLAMKEVIDAFISENGWVEDYGSGSPAAKRVKLD

SEQ ID NO: 241 - protein, 286 aa, synthetic construct
  source 1..286: note = OMOMYC-(GS)2-CHIP-NLS peptide
MSDTEENVKRRTHNVLERQRRNELKRSFFALRDQIPELENNEKAPKVVILKKATAYILSVQAETQKLISEIDLLRKQNEQLKHKLEQLRNSCAGSGSRLNFGDDIPSALRIAKKKRWNSIEERRIHQESELHSYLSRLIAAERERELEECQRNHEGDEDDSHVRAQQACIEAKHDKYMADMDELFSQVDEKRKKRDIPDYLCGKISFELMREPCITPSGITYDRKDIEEHLQRVGHFDPVTRSPLTQEQLIPNLAMKEVIDAFISENGWVEDYGSGSPAAKRVKLD

SEQ ID NO: 242 - protein, 288 aa, synthetic construct
  source 1..288: note = OMOMYC-(GS)3-CHIP-NLS peptide
MSDTEENVKRRTHNVLERQRRNELKRSFFALRDQIPELENNEKAPKVVILKKATAYILSVQAETQKLISEIDLLRKQNEQLKHKLEQLRNSCAGSGSGSRLNFGDDIPSALRIAKKKRWNSIEERRIHQESELHSYLSRLIAAERERELEECQRNHEGDEDDSHVRAQQACIEAKHDKYMADMDELFSQVDEKRKKRDIPDYLCGKISFELMREPCITPSGITYDRKDIEEHLQRVGHFDPVTRSPLTQEQLIPNLAMKEVIDAFISENGWVEDYGSGSPAAKRVKLD

SEQ ID NO: 243 - protein, 290 aa, synthetic construct
  source 1..290: note = OMOMYC-(GS)4-CHIP-NLS peptide
MSDTEENVKRRTHNVLERQRRNELKRSFFALRDQIPELENNEKAPKVVILKKATAYILSVQAETQKLISEIDLLRKQNEQLKHKLEQLRNSCAGSGSGSGSRLNFGDDIPSALRIAKKKRWNSIEERRIHQESELHSYLSRLIAAERERELEECQRNHEGDEDDSHVRAQQACIEAKHDKYMADMDELFSQVDEKRKKRDIPDYLCGKISFELMREPCITPSGITYDRKDIEEHLQRVGHFDPVTRSPLTQEQLIPNLAMKEVIDAFISENGWVEDYGSGSPAAKRVKLD

SEQ ID NO: 244 - protein, 292 aa, synthetic construct
  source 1..292: note = OMOMYC-(GS)5-CHIP-NLS peptide
MSDTEENVKRRTHNVLERQRRNELKRSFFALRDQIPELENNEKAPKVVILKKATAYILSVQAETQKLISEIDLLRKQNEQLKHKLEQLRNSCAGSGSGSGSGSRLNFGDDIPSALRIAKKKRWNSIEERRIHQESELHSYLSRLIAAERERELEECQRNHEGDEDDSHVRAQQACIEAKHDKYMADMDELFSQVDEKRKKRDIPDYLCGKISFELMREPCITPSGITYDRKDIEEHLQRVGHFDPVTRSPLTQEQLIPNLAMKEVIDAFISENGWVEDYGSGSPAAKRVKLD

SEQ ID NO: 245 - protein, 294 aa, synthetic construct
  source 1..294: note = OMOMYC-(GS)6-CHIP-NLS peptide
MSDTEENVKRRTHNVLERQRRNELKRSFFALRDQIPELENNEKAPKVVILKKATAYILSVQAETQKLISEIDLLRKQNEQLKHKLEQLRNSCAGSGSGSGSGSGSRLNFGDDIPSALRIAKKKRWNSIEERRIHQESELHSYLSRLIAAERERELEECQRNHEGDEDDSHVRAQQACIEAKHDKYMADMDELFSQVDEKRKKRDIPDYLCGKISFELMREPCITPSGITYDRKDIEEHLQRVGHFDPVTRSPLTQEQLIPNLAMKEVIDAFISENGWVEDYGSGSPAAKRVKLD

SEQ ID NO: 246 - protein, 293 aa, synthetic construct
  source 1..293: note = OMOMYC-(GS)1-CHIP-NLS-HA peptide
MSDTEENVKRRTHNVLERQRRNELKRSFFALRDQIPELENNEKAPKVVILKKATAYILSVQAETQKLISEIDLLRKQNEQLKHKLEQLRNSCAGSRLNFGDDIPSALRIAKKKRWNSIEERRIHQESELHSYLSRLIAAERERELEECQRNHEGDEDDSHVRAQQACIEAKHDKYMADMDELFSQVDEKRKKRDIPDYLCGKISFELMREPCITPSGITYDRKDIEEHLQRVGHFDPVTRSPLTQEQLIPNLAMKEVIDAFISENGWVEDYGSGSPAAKRVKLDYPYDVPDYA

SEQ ID NO: 247 - protein, 295 aa, synthetic construct
  source 1..295: note = OMOMYC-(GS)2-CHIP-NLS-HA peptide
MSDTEENVKRRTHNVLERQRRNELKRSFFALRDQIPELENNEKAPKVVILKKATAYILSVQAETQKLISEIDLLRKQNEQLKHKLEQLRNSCAGSGSRLNFGDDIPSALRIAKKKRWNSIEERRIHQESELHSYLSRLIAAERERELEECQRNHEGDEDDSHVRAQQACIEAKHDKYMADMDELFSQVDEKRKKRDIPDYLCGKISFELMREPCITPSGITYDRKDIEEHLQRVGHFDPVTRSPLTQEQLIPNLAMKEVIDAFISENGWVEDYGSGSPAAKRVKLDYPYDVPDYA

SEQ ID NO: 248 - protein, 297 aa, synthetic construct
  source 1..297: note = OMOMYC-(GS)3-CHIP-NLS-HA peptide
MSDTEENVKRRTHNVLERQRRNELKRSFFALRDQIPELENNEKAPKVVILKKATAYILSVQAETQKLISEIDLLRKQNEQLKHKLEQLRNSCAGSGSGSRLNFGDDIPSALRIAKKKRWNSIEERRIHQESELHSYLSRLIAAERERELEECQRNHEGDEDDSHVRAQQACIEAKHDKYMADMDELFSQVDEKRKKRDIPDYLCGKISFELMREPCITPSGITYDRKDIEEHLQRVGHFDPVTRSPLTQEQLIPNLAMKEVIDAFISENGWVEDYGSGSPAAKRVKLDYPYDVPDYA

SEQ ID NO: 249 - protein, 299 aa, synthetic construct
  source 1..299: note = OMOMYC-(GS)4-CHIP-NLS-HA peptide
MSDTEENVKRRTHNVLERQRRNELKRSFFALRDQIPELENNEKAPKVVILKKATAYILSVQAETQKLISEIDLLRKQNEQLKHKLEQLRNSCAGSGSGSGSRLNFGDDIPSALRIAKKKRWNSIEERRIHQESELHSYLSRLIAAERERELEECQRNHEGDEDDSHVRAQQACIEAKHDKYMADMDELFSQVDEKRKKRDIPDYLCGKISFELMREPCITPSGITYDRKDIEEHLQRVGHFDPVTRSPLTQEQLIPNLAMKEVIDAFISENGWVEDYGSGSPAAKRVKLDYPYDVPDYA

SEQ ID NO: 250 - protein, 301 aa, synthetic construct
  source 1..301: note = OMOMYC-(GS)5-CHIP-NLS-HA peptide
MSDTEENVKRRTHNVLERQRRNELKRSFFALRDQIPELENNEKAPKVVILKKATAYILSVQAETQKLISEIDLLRKQNEQLKHKLEQLRNSCAGSGSGSGSGSRLNFGDDIPSALRIAKKKRWNSIEERRIHQESELHSYLSRLIAAERERELEECQRNHEGDEDDSHVRAQQACIEAKHDKYMADMDELFSQVDEKRKKRDIPDYLCGKISFELMREPCITPSGITYDRKDIEEHLQRVGHFDPVTRSPLTQEQLIPNLAMKEVIDAFISENGWVEDYGSGSPAAKRVKLDYPYDVPDYA

SEQ ID NO: 251 - protein, 303 aa, synthetic construct
  source 1..303: note = OMOMYC-(GS)6-CHIP-NLS-HA peptide
MSDTEENVKRRTHNVLERQRRNELKRSFFALRDQIPELENNEKAPKVVILKKATAYILSVQAETQKLISEIDLLRKQNEQLKHKLEQLRNSCAGSGSGSGSGSGSRLNFGDDIPSALRIAKKKRWNSIEERRIHQESELHSYLSRLIAAERERELEECQRNHEGDEDDSHVRAQQACIEAKHDKYMADMDELFSQVDEKRKKRDIPDYLCGKISFELMREPCITPSGITYDRKDIEEHLQRVGHFDPVTRSPLTQEQLIPNLAMKEVIDAFISENGWVEDYGSGSPAAKRVKLDYPYDVPDYA

SEQ ID NO: 252 - protein, 144 aa, synthetic construct
  source 1..144: note = NLS-DCAF1-(GS)1-OMOMYC peptide
PAAKRVKLDGSGSGSQAPINFTSRLNRRASFPKYGGVDGGCFDRHLIFSRGSSDTEENVKRRTHNVLERQRRNELKRSFFALRDQIPELENNEKAPKVVILKKATAYILSVQAETQKLISEIDLLRKQNEQLKHKLEQLRNSCA

SEQ ID NO: 253 - protein, 146 aa, synthetic construct
  source 1..146: note = NLS-DCAF1-(GS)2-OMOMYC peptide
PAAKRVKLDGSGSGSQAPINFTSRLNRRASFPKYGGVDGGCFDRHLIFSRGSGSSDTEENVKRRTHNVLERQRRNELKRSFFALRDQIPELENNEKAPKVVILKKATAYILSVQAETQKLISEIDLLRKQNEQLKHKLEQLRNSCA

SEQ ID NO: 254 - protein, 148 aa, synthetic construct
  source 1..148: note = NLS-DCAF1-(GS)3-OMOMYC peptide
PAAKRVKLDGSGSGSQAPINFTSRLNRRASFPKYGGVDGGCFDRHLIFSRGSGSGSSDTEENVKRRTHNVLERQRRNELKRSFFALRDQIPELENNEKAPKVVILKKATAYILSVQAETQKLISEIDLLRKQNEQLKHKLEQLRNSCA

SEQ ID NO: 255 - protein, 150 aa, synthetic construct
  source 1..150: note = NLS-DCAF1-(GS)4-OMOMYC peptide
PAAKRVKLDGSGSGSQAPINFTSRLNRRASFPKYGGVDGGCFDRHLIFSRGSGSGSGSSDTEENVKRRTHNVLERQRRNELKRSFFALRDQIPELENNEKAPKVVILKKATAYILSVQAETQKLISEIDLLRKQNEQLKHKLEQLRNSCA

SEQ ID NO: 256 - protein, 152 aa, synthetic construct
  source 1..152: note = NLS-DCAF1-(GS)5-OMOMYC peptide
PAAKRVKLDGSGSGSQAPINFTSRLNRRASFPKYGGVDGGCFDRHLIFSRGSGSGSGSGSSDTEENVKRRTHNVLERQRRNELKRSFFALRDQIPELENNEKAPKVVILKKATAYILSVQAETQKLISEIDLLRKQNEQLKHKLEQLRNSCA

SEQ ID NO: 257 - protein, 154 aa, synthetic construct
  source 1..154: note = NLS-DCAF1-(GS)6-OMOMYC peptide
PAAKRVKLDGSGSGSQAPINFTSRLNRRASFPKYGGVDGGCFDRHLIFSRGSGSGSGSGSGSSDTEENVKRRTHNVLERQRRNELKRSFFALRDQIPELENNEKAPKVVILKKATAYILSVQAETQKLISEIDLLRKQNEQLKHKLEQLRNSCA

SEQ ID NO: 258 - protein, 154 aa, synthetic construct
  source 1..154: note = HA-NLS-DCAF1-(GS)1-OMOMYC peptide
MYPYDVPDYAPAAKRVKLDGSGSGSQAPINFTSRLNRRASFPKYGGVDGGCFDRHLIFSRGSSDTEENVKRRTHNVLERQRRNELKRSFFALRDQIPELENNEKAPKVVILKKATAYILSVQAETQKLISEIDLLRKQNEQLKHKLEQLRNSCA

SEQ ID NO: 259 - protein, 156 aa, synthetic construct
  source 1..156: note = HA-NLS-DCAF1-(GS)2-OMOMYC peptide
MYPYDVPDYAPAAKRVKLDGSGSGSQAPINFTSRLNRRASFPKYGGVDGGCFDRHLIFSRGSGSSDTEENVKRRTHNVLERQRRNELKRSFFALRDQIPELENNEKAPKVVILKKATAYILSVQAETQKLISEIDLLRKQNEQLKHKLEQLRNSCA

SEQ ID NO: 260 - protein, 158 aa, synthetic construct
  source 1..158: note = HA-NLS-DCAF1-(GS)3-OMOMYC peptide
MYPYDVPDYAPAAKRVKLDGSGSGSQAPINFTSRLNRRASFPKYGGVDGGCFDRHLIFSRGSGSGSSDTEENVKRRTHNVLERQRRNELKRSFFALRDQIPELENNEKAPKVVILKKATAYILSVQAETQKLISEIDLLRKQNEQLKHKLEQLRNSCA

SEQ ID NO: 261 - protein, 160 aa, synthetic construct
  source 1..160: note = HA-NLS-DCAF1-(GS)4-OMOMYC peptide
MYPYDVPDYAPAAKRVKLDGSGSGSQAPINFTSRLNRRASFPKYGGVDGGCFDRHLIFSRGSGSGSGSSDTEENVKRRTHNVLERQRRNELKRSFFALRDQIPELENNEKAPKVVILKKATAYILSVQAETQKLISEIDLLRKQNEQLKHKLEQLRNSCA

SEQ ID NO: 262 - protein, 162 aa, synthetic construct
  source 1..162: note = HA-NLS-DCAF1-(GS)5-OMOMYC peptide
MYPYDVPDYAPAAKRVKLDGSGSGSQAPINFTSRLNRRASFPKYGGVDGGCFDRHLIFSRGSGSGSGSGSSDTEENVKRRTHNVLERQRRNELKRSFFALRDQIPELENNEKAPKVVILKKATAYILSVQAETQKLISEIDLLRKQNEQLKHKLEQLRNSCA

SEQ ID NO: 263 - protein, 164 aa, synthetic construct
  source 1..164: note = HA-NLS-DCAF1-(GS)6-OMOMYC peptide
MYPYDVPDYAPAAKRVKLDGSGSGSQAPINFTSRLNRRASFPKYGGVDGGCFDRHLIFSRGSGSGSGSGSGSSDTEENVKRRTHNVLERQRRNELKRSFFALRDQIPELENNEKAPKVVILKKATAYILSVQAETQKLISEIDLLRKQNEQLKHKLEQLRNSCA

SEQ ID NO: 264 - protein, 465 aa, synthetic construct
  source 1..465: note = NLS-OMOMYC-(GS)1-E6AP peptide
PAAKRVKLDGSGSGSSDTEENVKRRTHNVLERQRRNELKRSFFALRDQIPELENNEKAPKVVILKKATAYILSVQAETQKLISEIDLLRKQNEQLKHKLEQLRNSCAGSNPYLRLKVRRDHIIDDALVRLEMIAMENPADLKKQLYVEFEGEQGVDEGGVSKEFFQLVVEEIFNPDIGMFTYDESTKLFWFNPSSFETEGQFTLIGIVLGLAIYNNCILDVHFPMVVYRKLMGKKGTFRDLGDSHPVLYQSLKDLLEYEGNVEDDMMITFQISQTDLFGNPMMYDLKENGDKIPITNENRKEFVNLYSDYILNKSVEKQFKAFRRGFHMVTNESPLKYLFRPEEIELLICGSRNLDFQALEETTEYDGGYTRDSVLIREFWEIVHSFTDEQKRLFLQFTTGTDRAPVGGLGKLKMIIAKNGPDTERLPTSHTCFNVLLLPEYSSKEKLKERLLKAITYAKGFGML

SEQ ID NO: 265 - protein, 467 aa, synthetic construct
  source 1..467: note = NLS-OMOMYC-(GS)2-E6AP peptide
PAAKRVKLDGSGSGSSDTEENVKRRTHNVLERQRRNELKRSFFALRDQIPELENNEKAPKVVILKKATAYILSVQAETQKLISEIDLLRKQNEQLKHKLEQLRNSCAGSGSNPYLRLKVRRDHIIDDALVRLEMIAMENPADLKKQLYVEFEGEQGVDEGGVSKEFFQLVVEEIFNPDIGMFTYDESTKLFWFNPSSFETEGQFTLIGIVLGLAIYNNCILDVHFPMVVYRKLMGKKGTFRDLGDSHPVLYQSLKDLLEYEGNVEDDMMITFQISQTDLFGNPMMYDLKENGDKIPITNENRKEFVNLYSDYILNKSVEKQFKAFRRGFHMVTNESPLKYLFRPEEIELLICGSRNLDFQALEETTEYDGGYTRDSVLIREFWEIVHSFTDEQKRLFLQFTTGTDRAPVGGLGKLKMIIAKNGPDTERLPTSHTCFNVLLLPEYSSKEKLKERLLKAITYAKGFGML

SEQ ID NO: 266 - protein, 469 aa, synthetic construct
  source 1..469: note = NLS-OMOMYC-(GS)3-E6AP peptide
PAAKRVKLDGSGSGSSDTEENVKRRTHNVLERQRRNELKRSFFALRDQIPELENNEKAPKVVILKKATAYILSVQAETQKLISEIDLLRKQNEQLKHKLEQLRNSCAGSGSGSNPYLRLKVRRDHIIDDALVRLEMIAMENPADLKKQLYVEFEGEQGVDEGGVSKEFFQLVVEEIFNPDIGMFTYDESTKLFWFNPSSFETEGQFTLIGIVLGLAIYNNCILDVHFPMVVYRKLMGKKGTFRDLGDSHPVLYQSLKDLLEYEGNVEDDMMITFQISQTDLFGNPMMYDLKENGDKIPITNENRKEFVNLYSDYILNKSVEKQFKAFRRGFHMVTNESPLKYLFRPEEIELLICGSRNLDFQALEETTEYDGGYTRDSVLIREFWEIVHSFTDEQKRLFLQFTTGTDRAPVGGLGKLKMIIAKNGPDTERLPTSHTCFNVLLLPEYSSKEKLKERLLKAITYAKGFGML

SEQ ID NO: 267 - protein, 471 aa, synthetic construct
  source 1..471: note = NLS-OMOMYC-(GS)4-E6AP peptide
PAAKRVKLDGSGSGSSDTEENVKRRTHNVLERQRRNELKRSFFALRDQIPELENNEKAPKVVILKKATAYILSVQAETQKLISEIDLLRKQNEQLKHKLEQLRNSCAGSGSGSGSNPYLRLKVRRDHIIDDALVRLEMIAMENPADLKKQLYVEFEGEQGVDEGGVSKEFFQLVVEEIFNPDIGMFTYDESTKLFWFNPSSFETEGQFTLIGIVLGLAIYNNCILDVHFPMVVYRKLMGKKGTFRDLGDSHPVLYQSLKDLLEYEGNVEDDMMITFQISQTDLFGNPMMYDLKENGDKIPITNENRKEFVNLYSDYILNKSVEKQFKAFRRGFHMVTNESPLKYLFRPEEIELLICGSRNLDFQALEETTEYDGGYTRDSVLIREFWEIVHSFTDEQKRLFLQFTTGTDRAPVGGLGKLKMIIAKNGPDTERLPTSHTCFNVLLLPEYSSKEKLKERLLKAITYAKGFGML

SEQ ID NO: 268 - protein, 473 aa, synthetic construct
  source 1..473: note = NLS-OMOMYC-(GS)5-E6AP peptide
PAAKRVKLDGSGSGSSDTEENVKRRTHNVLERQRRNELKRSFFALRDQIPELENNEKAPKVVILKKATAYILSVQAETQKLISEIDLLRKQNEQLKHKLEQLRNSCAGSGSGSGSGSNPYLRLKVRRDHIIDDALVRLEMIAMENPADLKKQLYVEFEGEQGVDEGGVSKEFFQLVVEEIFNPDIGMFTYDESTKLFWFNPSSFETEGQFTLIGIVLGLAIYNNCILDVHFPMVVYRKLMGKKGTFRDLGDSHPVLYQSLKDLLEYEGNVEDDMMITFQISQTDLFGNPMMYDLKENGDKIPITNENRKEFVNLYSDYILNKSVEKQFKAFRRGFHMVTNESPLKYLFRPEEIELLICGSRNLDFQALEETTEYDGGYTRDSVLIREFWEIVHSFTDEQKRLFLQFTTGTDRAPVGGLGKLKMIIAKNGPDTERLPTSHTCFNVLLLPEYSSKEKLKERLLKAITYAKGFGML

SEQ ID NO: 269 - protein, 475 aa, synthetic construct
  source 1..475: note = NLS-OMOMYC-(GS)6-E6AP peptide
PAAKRVKLDGSGSGSSDTEENVKRRTHNVLERQRRNELKRSFFALRDQIPELENNEKAPKVVILKKATAYILSVQAETQKLISEIDLLRKQNEQLKHKLEQLRNSCAGSGSGSGSGSGSNPYLRLKVRRDHIIDDALVRLEMIAMENPADLKKQLYVEFEGEQGVDEGGVSKEFFQLVVEEIFNPDIGMFTYDESTKLFWFNPSSFETEGQFTLIGIVLGLAIYNNCILDVHFPMVVYRKLMGKKGTFRDLGDSHPVLYQSLKDLLEYEGNVEDDMMITFQISQTDLFGNPMMYDLKENGDKIPITNENRKEFVNLYSDYILNKSVEKQFKAFRRGFHMVTNESPLKYLFRPEEIELLICGSRNLDFQALEETTEYDGGYTRDSVLIREFWEIVHSFTDEQKRLFLQFTTGTDRAPVGGLGKLKMIIAKNGPDTERLPTSHTCFNVLLLPEYSSKEKLKERLLKAITYAKGFGML

SEQ ID NO: 270 - protein, 475 aa, synthetic construct
  source 1..475: note = HA-NLS-OMOMYC-(GS)1-E6AP peptide
MYPYDVPDYAPAAKRVKLDGSGSGSSDTEENVKRRTHNVLERQRRNELKRSFFALRDQIPELENNEKAPKVVILKKATAYILSVQAETQKLISEIDLLRKQNEQLKHKLEQLRNSCAGSNPYLRLKVRRDHIIDDALVRLEMIAMENPADLKKQLYVEFEGEQGVDEGGVSKEFFQLVVEEIFNPDIGMFTYDESTKLFWFNPSSFETEGQFTLIGIVLGLAIYNNCILDVHFPMVVYRKLMGKKGTFRDLGDSHPVLYQSLKDLLEYEGNVEDDMMITFQISQTDLFGNPMMYDLKENGDKIPITNENRKEFVNLYSDYILNKSVEKQFKAFRRGFHMVTNESPLKYLFRPEEIELLICGSRNLDFQALEETTEYDGGYTRDSVLIREFWEIVHSFTDEQKRLFLQFTTGTDRAPVGGLGKLKMIIAKNGPDTERLPTSHTCFNVLLLPEYSSKEKLKERLLKAITYAKGFGML

SEQ ID NO: 271 - protein, 477 aa, synthetic construct
  source 1..477: note = HA-NLS-OMOMYC-(GS)2-E6AP peptide
MYPYDVPDYAPAAKRVKLDGSGSGSSDTEENVKRRTHNVLERQRRNELKRSFFALRDQIPELENNEKAPKVVILKKATAYILSVQAETQKLISEIDLLRKQNEQLKHKLEQLRNSCAGSGSNPYLRLKVRRDHIIDDALVRLEMIAMENPADLKKQLYVEFEGEQGVDEGGVSKEFFQLVVEEIFNPDIGMFTYDESTKLFWFNPSSFETEGQFTLIGIVLGLAIYNNCILDVHFPMVVYRKLMGKKGTFRDLGDSHPVLYQSLKDLLEYEGNVEDDMMITFQISQTDLFGNPMMYDLKENGDKIPITNENRKEFVNLYSDYILNKSVEKQFKAFRRGFHMVTNESPLKYLFRPEEIELLICGSRNLDFQALEETTEYDGGYTRDSVLIREFWEIVHSFTDEQKRLFLQFTTGTDRAPVGGLGKLKMIIAKNGPDTERLPTSHTCFNVLLLPEYSSKEKLKERLLKAITYAKGFGML

SEQ ID NO: 272 - protein, 479 aa, synthetic construct
  source 1..479: note = HA-NLS-OMOMYC-(GS)3-E6AP peptide
MYPYDVPDYAPAAKRVKLDGSGSGSSDTEENVKRRTHNVLERQRRNELKRSFFALRDQIPELENNEKAPKVVILKKATAYILSVQAETQKLISEIDLLRKQNEQLKHKLEQLRNSCAGSGSGSNPYLRLKVRRDHIIDDALVRLEMIAMENPADLKKQLYVEFEGEQGVDEGGVSKEFFQLVVEEIFNPDIGMFTYDESTKLFWFNPSSFETEGQFTLIGIVLGLAIYNNCILDVHFPMVVYRKLMGKKGTFRDLGDSHPVLYQSLKDLLEYEGNVEDDMMITFQISQTDLFGNPMMYDLKENGDKIPITNENRKEFVNLYSDYILNKSVEKQFKAFRRGFHMVTNESPLKYLFRPEEIELLICGSRNLDFQALEETTEYDGGYTRDSVLIREFWEIVHSFTDEQKRLFLQFTTGTDRAPVGGLGKLKMIIAKNGPDTERLPTSHTCFNVLLLPEYSSKEKLKERLLKAITYAKGFGML

SEQ ID NO: 273 - protein, 481 aa, synthetic construct
  source 1..481: note = HA-NLS-OMOMYC-(GS)4-E6AP peptide
MYPYDVPDYAPAAKRVKLDGSGSGSSDTEENVKRRTHNVLERQRRNELKRSFFALRDQIPELENNEKAPKVVILKKATAYILSVQAETQKLISEIDLLRKQNEQLKHKLEQLRNSCAGSGSGSGSNPYLRLKVRRDHIIDDALVRLEMIAMENPADLKKQLYVEFEGEQGVDEGGVSKEFFQLVVEEIFNPDIGMFTYDESTKLFWFNPSSFETEGQFTLIGIVLGLAIYNNCILDVHFPMVVYRKLMGKKGTFRDLGDSHPVLYQSLKDLLEYEGNVEDDMMITFQISQTDLFGNPMMYDLKENGDKIPITNENRKEFVNLYSDYILNKSVEKQFKAFRRGFHMVTNESPLKYLFRPEEIELLICGSRNLDFQALEETTEYDGGYTRDSVLIREFWEIVHSFTDEQKRLFLQFTTGTDRAPVGGLGKLKMIIAKNGPDTERLPTSHTCFNVLLLPEYSSKEKLKERLLKAITYAKGFGML

SEQ ID NO: 274 - protein, 483 aa, synthetic construct
  source 1..483: note = HA-NLS-OMOMYC-(GS)5-E6AP peptide
MYPYDVPDYAPAAKRVKLDGSGSGSSDTEENVKRRTHNVLERQRRNELKRSFFALRDQIPELENNEKAPKVVILKKATAYILSVQAETQKLISEIDLLRKQNEQLKHKLEQLRNSCAGSGSGSGSGSNPYLRLKVRRDHIIDDALVRLEMIAMENPADLKKQLYVEFEGEQGVDEGGVSKEFFQLVVEEIFNPDIGMFTYDESTKLFWFNPSSFETEGQFTLIGIVLGLAIYNNCILDVHFPMVVYRKLMGKKGTFRDLGDSHPVLYQSLKDLLEYEGNVEDDMMITFQISQTDLFGNPMMYDLKENGDKIPITNENRKEFVNLYSDYILNKSVEKQFKAFRRGFHMVTNESPLKYLFRPEEIELLICGSRNLDFQALEETTEYDGGYTRDSVLIREFWEIVHSFTDEQKRLFLQFTTGTDRAPVGGLGKLKMIIAKNGPDTERLPTSHTCFNVLLLPEYSSKEKLKERLLKAITYAKGFGML

SEQ ID NO: 275 - protein, 485 aa, synthetic construct
  source 1..485: note = HA-NLS-OMOMYC-(GS)6-E6AP peptide
MYPYDVPDYAPAAKRVKLDGSGSGSSDTEENVKRRTHNVLERQRRNELKRSFFALRDQIPELENNEKAPKVVILKKATAYILSVQAETQKLISEIDLLRKQNEQLKHKLEQLRNSCAGSGSGSGSGSGSNPYLRLKVRRDHIIDDALVRLEMIAMENPADLKKQLYVEFEGEQGVDEGGVSKEFFQLVVEEIFNPDIGMFTYDESTKLFWFNPSSFETEGQFTLIGIVLGLAIYNNCILDVHFPMVVYRKLMGKKGTFRDLGDSHPVLYQSLKDLLEYEGNVEDDMMITFQISQTDLFGNPMMYDLKENGDKIPITNENRKEFVNLYSDYILNKSVEKQFKAFRRGFHMVTNESPLKYLFRPEEIELLICGSRNLDFQALEETTEYDGGYTRDSVLIREFWEIVHSFTDEQKRLFLQFTTGTDRAPVGGLGKLKMIIAKNGPDTERLPTSHTCFNVLLLPEYSSKEKLKERLLKAITYAKGFGML

SEQ ID NO: 276 - protein, 461 aa, synthetic construct
  source 1..461: note = FBXW7a-(GS)1-OMOMYC peptide
NQELLSVGSKRRRTGGSLRGNPSSSQVDEEQMNRVVEEEQQQQLRQQEEEHTARNGEVVGVEPRPGGQNDSQQGQLEENNNRFISVDEDSSGNQEEQEEDEEHAGEQDEEDEEEEEMDQESDDFDQSDDSSREDEHTHTNSVTNSSSIVDLPVHQLSSPFYTKTTKMKRKLDHGSEVRSFSLGKKPCKVSEYTSTTGLVPCSATPTTFGDLRAANGQGQQRRRITSVQPPTGLQEWLKMFQSWSGPEKLLALDELIDSCEPTQVKHMMQVIEPQFQRDFISLLPKELALYVLSFLEPKDLLQAAQTCRYWRILAEDNLLWREKCKEEGIDEPLHIKRRKVIKPGFIHSPWKSAYIRQHRIDTNSRRGGSSDTEENVKRRTHNVLERQRRNELKRSFFALRDQIPELENNEKAPKVVILKKATAYILSVQAETQKLISEIDLLRKQNEQLKHKLEQLRNSCA

SEQ ID NO: 277 - protein, 463 aa, synthetic construct
  source 1..463: note = FBXW7a-(GS)2-OMOMYC peptide
NQELLSVGSKRRRTGGSLRGNPSSSQVDEEQMNRVVEEEQQQQLRQQEEEHTARNGEVVGVEPRPGGQNDSQQGQLEENNNRFISVDEDSSGNQEEQEEDEEHAGEQDEEDEEEEEMDQESDDFDQSDDSSREDEHTHTNSVTNSSSIVDLPVHQLSSPFYTKTTKMKRKLDHGSEVRSFSLGKKPCKVSEYTSTTGLVPCSATPTTFGDLRAANGQGQQRRRITSVQPPTGLQEWLKMFQSWSGPEKLLALDELIDSCEPTQVKHMMQVIEPQFQRDFISLLPKELALYVLSFLEPKDLLQAAQTCRYWRILAEDNLLWREKCKEEGIDEPLHIKRRKVIKPGFIHSPWKSAYIRQHRIDTNSRRGGSGSSDTEENVKRRTHNVLERQRRNELKRSFFALRDQIPELENNEKAPKVVILKKATAYILSVQAETQKLISEIDLLRKQNEQLKHKLEQLRNSCA

SEQ ID NO: 278 - protein, 465 aa, synthetic construct
  source 1..465: note = FBXW7a-(GS)3-OMOMYC peptide
NQELLSVGSKRRRTGGSLRGNPSSSQVDEEQMNRVVEEEQQQQLRQQEEEHTARNGEVVGVEPRPGGQNDSQQGQLEENNNRFISVDEDSSGNQEEQEEDEEHAGEQDEEDEEEEEMDQESDDFDQSDDSSREDEHTHTNSVTNSSSIVDLPVHQLSSPFYTKTTKMKRKLDHGSEVRSFSLGKKPCKVSEYTSTTGLVPCSATPTTFGDLRAANGQGQQRRRITSVQPPTGLQEWLKMFQSWSGPEKLLALDELIDSCEPTQVKHMMQVIEPQFQRDFISLLPKELALYVLSFLEPKDLLQAAQTCRYWRILAEDNLLWREKCKEEGIDEPLHIKRRKVIKPGFIHSPWKSAYIRQHRIDTNSRRGGSGSGSSDTEENVKRRTHNVLERQRRNELKRSFFALRDQIPELENNEKAPKVVILKKATAYILSVQAETQKLISEIDLLRKQNEQLKHKLEQLRNSCA

SEQ ID NO: 279 - protein, 467 aa, synthetic construct
  source 1..467: note = FBXW7a-(GS)4-OMOMYC peptide
NQELLSVGSKRRRTGGSLRGNPSSSQVDEEQMNRVVEEEQQQQLRQQEEEHTARNGEVVGVEPRPGGQNDSQQGQLEENNNRFISVDEDSSGNQEEQEEDEEHAGEQDEEDEEEEEMDQESDDFDQSDDSSREDEHTHTNSVTNSSSIVDLPVHQLSSPFYTKTTKMKRKLDHGSEVRSFSLGKKPCKVSEYTSTTGLVPCSATPTTFGDLRAANGQGQQRRRITSVQPPTGLQEWLKMFQSWSGPEKLLALDELIDSCEPTQVKHMMQVIEPQFQRDFISLLPKELALYVLSFLEPKDLLQAAQTCRYWRILAEDNLLWREKCKEEGIDEPLHIKRRKVIKPGFIHSPWKSAYIRQHRIDTNSRRGGSGSGSGSSDTEENVKRRTHNVLERQRRNELKRSFFALRDQIPELENNEKAPKVVILKKATAYILSVQAETQKLISEIDLLRKQNEQLKHKLEQLRNSCA

SEQ ID NO: 280 - protein, 469 aa, synthetic construct
  source 1..469: note = FBXW7a-(GS)5-OMOMYC peptide
NQELLSVGSKRRRTGGSLRGNPSSSQVDEEQMNRVVEEEQQQQLRQQEEEHTARNGEVVGVEPRPGGQNDSQQGQLEENNNRFISVDEDSSGNQEEQEEDEEHAGEQDEEDEEEEEMDQESDDFDQSDDSSREDEHTHTNSVTNSSSIVDLPVHQLSSPFYTKTTKMKRKLDHGSEVRSFSLGKKPCKVSEYTSTTGLVPCSATPTTFGDLRAANGQGQQRRRITSVQPPTGLQEWLKMFQSWSGPEKLLALDELIDSCEPTQVKHMMQVIEPQFQRDFISLLPKELALYVLSFLEPKDLLQAAQTCRYWRILAEDNLLWREKCKEEGIDEPLHIKRRKVIKPGFIHSPWKSAYIRQHRIDTNSRRGGSGSGSGSGSSDTEENVKRRTHNVLERQRRNELKRSFFALRDQIPELENNEKAPKVVILKKATAYILSVQAETQKLISEIDLLRKQNEQLKHKLEQLRNSCA

SEQ ID NO: 281 - protein, 471 aa, synthetic construct
  source 1..471: note = FBXW7a-(GS)6-OMOMYC peptide
NQELLSVGSKRRRTGGSLRGNPSSSQVDEEQMNRVVEEEQQQQLRQQEEEHTARNGEVVGVEPRPGGQNDSQQGQLEENNNRFISVDEDSSGNQEEQEEDEEHAGEQDEEDEEEEEMDQESDDFDQSDDSSREDEHTHTNSVTNSSSIVDLPVHQLSSPFYTKTTKMKRKLDHGSEVRSFSLGKKPCKVSEYTSTTGLVPCSATPTTFGDLRAANGQGQQRRRITSVQPPTGLQEWLKMFQSWSGPEKLLALDELIDSCEPTQVKHMMQVIEPQFQRDFISLLPKELALYVLSFLEPKDLLQAAQTCRYWRILAEDNLLWREKCKEEGIDEPLHIKRRKVIKPGFIHSPWKSAYIRQHRIDTNSRRGGSGSGSGSGSGSSDTEENVKRRTHNVLERQRRNELKRSFFALRDQIPELENNEKAPKVVILKKATAYILSVQAETQKLISEIDLLRKQNEQLKHKLEQLRNSCA

SEQ ID NO: 282 - protein, 471 aa, synthetic construct
  source 1..471: note = HA-FBXW7a-(GS)1-OMOMYC peptide
MYPYDVPDYANQELLSVGSKRRRTGGSLRGNPSSSQVDEEQMNRVVEEEQQQQLRQQEEEHTARNGEVVGVEPRPGGQNDSQQGQLEENNNRFISVDEDSSGNQEEQEEDEEHAGEQDEEDEEEEEMDQESDDFDQSDDSSREDEHTHTNSVTNSSSIVDLPVHQLSSPFYTKTTKMKRKLDHGSEVRSFSLGKKPCKVSEYTSTTGLVPCSATPTTFGDLRAANGQGQQRRRITSVQPPTGLQEWLKMFQSWSGPEKLLALDELIDSCEPTQVKHMMQVIEPQFQRDFISLLPKELALYVLSFLEPKDLLQAAQTCRYWRILAEDNLLWREKCKEEGIDEPLHIKRRKVIKPGFIHSPWKSAYIRQHRIDTNSRRGGSSDTEENVKRRTHNVLERQRRNELKRSFFALRDQIPELENNEKAPKVVILKKATAYILSVQAETQKLISEIDLLRKQNEQLKHKLEQLRNSCA

SEQ ID NO: 283 - protein, 473 aa, synthetic construct
  source 1..473: note = HA-FBXW7a-(GS)2-OMOMYC peptide
MYPYDVPDYANQELLSVGSKRRRTGGSLRGNPSSSQVDEEQMNRVVEEEQQQQLRQQEEEHTARNGEVVGVEPRPGGQNDSQQGQLEENNNRFISVDEDSSGNQEEQEEDEEHAGEQDEEDEEEEEMDQESDDFDQSDDSSREDEHTHTNSVTNSSSIVDLPVHQLSSPFYTKTTKMKRKLDHGSEVRSFSLGKKPCKVSEYTSTTGLVPCSATPTTFGDLRAANGQGQQRRRITSVQPPTGLQEWLKMFQSWSGPEKLLALDELIDSCEPTQVKHMMQVIEPQFQRDFISLLPKELALYVLSFLEPKDLLQAAQTCRYWRILAEDNLLWREKCKEEGIDEPLHIKRRKVIKPGFIHSPWKSAYIRQHRIDTNSRRGGSGSSDTEENVKRRTHNVLERQRRNELKRSFFALRDQIPELENNEKAPKVVILKKATAYILSVQAETQKLISEIDLLRKQNEQLKHKLEQLRNSCA

SEQ ID NO: 284 - protein, 475 aa, synthetic construct
  source 1..475: note = HA-FBXW7a-(GS)3-OMOMYC peptide
MYPYDVPDYANQELLSVGSKRRRTGGSLRGNPSSSQVDEEQMNRVVEEEQQQQLRQQEEEHTARNGEVVGVEPRPGGQNDSQQGQLEENNNRFISVDEDSSGNQEEQEEDEEHAGEQDEEDEEEEEMDQESDDFDQSDDSSREDEHTHTNSVTNSSSIVDLPVHQLSSPFYTKTTKMKRKLDHGSEVRSFSLGKKPCKVSEYTSTTGLVPCSATPTTFGDLRAANGQGQQRRRITSVQPPTGLQEWLKMFQSWSGPEKLLALDELIDSCEPTQVKHMMQVIEPQFQRDFISLLPKELALYVLSFLEPKDLLQAAQTCRYWRILAEDNLLWREKCKEEGIDEPLHIKRRKVIKPGFIHSPWKSAYIRQHRIDTNSRRGGSGSGSSDTEENVKRRTHNVLERQRRNELKRSFFALRDQIPELENNEKAPKVVILKKATAYILSVQAETQKLISEIDLLRKQNEQLKHKLEQLRNSCA

SEQ ID NO: 285 - protein, 477 aa, synthetic construct
  source 1..477: note = HA-FBXW7a-(GS)4-OMOMYC peptide
MYPYDVPDYANQELLSVGSKRRRTGGSLRGNPSSSQVDEEQMNRVVEEEQQQQLRQQEEEHTARNGEVVGVEPRPGGQNDSQQGQLEENNNRFISVDEDSSGNQEEQEEDEEHAGEQDEEDEEEEEMDQESDDFDQSDDSSREDEHTHTNSVTNSSSIVDLPVHQLSSPFYTKTTKMKRKLDHGSEVRSFSLGKKPCKVSEYTSTTGLVPCSATPTTFGDLRAANGQGQQRRRITSVQPPTGLQEWLKMFQSWSGPEKLLALDELIDSCEPTQVKHMMQVIEPQFQRDFISLLPKELALYVLSFLEPKDLLQAAQTCRYWRILAEDNLLWREKCKEEGIDEPLHIKRRKVIKPGFIHSPWKSAYIRQHRIDTNSRRGGSGSGSGSSDTEENVKRRTHNVLERQRRNELKRSFFALRDQIPELENNEKAPKVVILKKATAYILSVQAETQKLISEIDLLRKQNEQLKHKLEQLRNSCA

SEQ ID NO: 286 - protein, 479 aa, synthetic construct
  source 1..479: note = HA-FBXW7a-(GS)5-OMOMYC peptide
MYPYDVPDYANQELLSVGSKRRRTGGSLRGNPSSSQVDEEQMNRVVEEEQQQQLRQQEEEHTARNGEVVGVEPRPGGQNDSQQGQLEENNNRFISVDEDSSGNQEEQEEDEEHAGEQDEEDEEEEEMDQESDDFDQSDDSSREDEHTHTNSVTNSSSIVDLPVHQLSSPFYTKTTKMKRKLDHGSEVRSFSLGKKPCKVSEYTSTTGLVPCSATPTTFGDLRAANGQGQQRRRITSVQPPTGLQEWLKMFQSWSGPEKLLALDELIDSCEPTQVKHMMQVIEPQFQRDFISLLPKELALYVLSFLEPKDLLQAAQTCRYWRILAEDNLLWREKCKEEGIDEPLHIKRRKVIKPGFIHSPWKSAYIRQHRIDTNSRRGGSGSGSGSGSSDTEENVKRRTHNVLERQRRNELKRSFFALRDQIPELENNEKAPKVVILKKATAYILSVQAETQKLISEIDLLRKQNEQLKHKLEQLRNSCA

SEQ ID NO: 287 - protein, 481 aa, synthetic construct
  source 1..481: note = HA-FBXW7a-(GS)6-OMOMYC peptide
MYPYDVPDYANQELLSVGSKRRRTGGSLRGNPSSSQVDEEQMNRVVEEEQQQQLRQQEEEHTARNGEVVGVEPRPGGQNDSQQGQLEENNNRFISVDEDSSGNQEEQEEDEEHAGEQDEEDEEEEEMDQESDDFDQSDDSSREDEHTHTNSVTNSSSIVDLPVHQLSSPFYTKTTKMKRKLDHGSEVRSFSLGKKPCKVSEYTSTTGLVPCSATPTTFGDLRAANGQGQQRRRITSVQPPTGLQEWLKMFQSWSGPEKLLALDELIDSCEPTQVKHMMQVIEPQFQRDFISLLPKELALYVLSFLEPKDLLQAAQTCRYWRILAEDNLLWREKCKEEGIDEPLHIKRRKVIKPGFIHSPWKSAYIRQHRIDTNSRRGGSGSGSGSGSGSSDTEENVKRRTHNVLERQRRNELKRSFFALRDQIPELENNEKAPKVVILKKATAYILSVQAETQKLISEIDLLRKQNEQLKHKLEQLRNSCA

SEQ ID NO: 288 - protein, 430 aa, synthetic construct
  source 1..430: note = NLS-Keap1-(GS)1-OMOMYC peptide
PAAKRVKLDGSGSGSQPDPRPSGAGACCRFLPLQSQCPEGAGDAVMYASTECKAEVTPSQHGNRTFSYTLEDHTKQAFGIMNELRLSQQLCDVTLQVKYQDAPAAQFMAHKVVLASSSPVFKAMFTNGLREQGMEVVSIEGIHPKVMERLIEFAYTASISMGEKCVLHVMNGAVMYQIDSVVRACSDFLVQQLDPSNAIGIANFAEQIGCVELHQRAREYIYMHFGEVAKQEEFFNLSHCQLVTLISRDDLNVRCESEVFHACINWVKYDCEQRRFYVQALLRAVRCHSLTPNFLQMQLQKCEILQSDSRCKDYLVKIFEELTLHKPTQVMPCRAPGSSDTEENVKRRTHNVLERQRRNELKRSFFALRDQIPELENNEKAPKVVILKKATAYILSVQAETQKLISEIDLLRKQNEQLKHKLEQLRNSCA

SEQ ID NO: 289 - protein, 432 aa, synthetic construct
  source 1..432: note = NLS-Keap1-(GS)2-OMOMYC peptide
PAAKRVKLDGSGSGSQPDPRPSGAGACCRFLPLQSQCPEGAGDAVMYASTECKAEVTPSQHGNRTFSYTLEDHTKQAFGIMNELRLSQQLCDVTLQVKYQDAPAAQFMAHKVVLASSSPVFKAMFTNGLREQGMEVVSIEGIHPKVMERLIEFAYTASISMGEKCVLHVMNGAVMYQIDSVVRACSDFLVQQLDPSNAIGIANFAEQIGCVELHQRAREYIYMHFGEVAKQEEFFNLSHCQLVTLISRDDLNVRCESEVFHACINWVKYDCEQRRFYVQALLRAVRCHSLTPNFLQMQLQKCEILQSDSRCKDYLVKIFEELTLHKPTQVMPCRAPGSGSSDTEENVKRRTHNVLERQRRNELKRSFFALRDQIPELENNEKAPKVVILKKATAYILSVQAETQKLISEIDLLRKQNEQLKHKLEQLRNSCA

SEQ ID NO: 290 - protein, 434 aa, synthetic construct
  source 1..434: note = NLS-Keap1-(GS)3-OMOMYC peptide
PAAKRVKLDGSGSGSQPDPRPSGAGACCRFLPLQSQCPEGAGDAVMYASTECKAEVTPSQHGNRTFSYTLEDHTKQAFGIMNELRLSQQLCDVTLQVKYQDAPAAQFMAHKVVLASSSPVFKAMFTNGLREQGMEVVSIEGIHPKVMERLIEFAYTASISMGEKCVLHVMNGAVMYQIDSVVRACSDFLVQQLDPSNAIGIANFAEQIGCVELHQRAREYIYMHFGEVAKQEEFFNLSHCQLVTLISRDDLNVRCESEVFHACINWVKYDCEQRRFYVQALLRAVRCHSLTPNFLQMQLQKCEILQSDSRCKDYLVKIFEELTLHKPTQVMPCRAPGSGSGSSDTEENVKRRTHNVLERQRRNELKRSFFALRDQIPELENNEKAPKVVILKKATAYILSVQAETQKLISEIDLLRKQNEQLKHKLEQLRNSCA

SEQ ID NO: 291 - protein, 436 aa, synthetic construct
  source 1..436: note = NLS-Keap1-(GS)4-OMOMYC peptide
PAAKRVKLDGSGSGSQPDPRPSGAGACCRFLPLQSQCPEGAGDAVMYASTECKAEVTPSQHGNRTFSYTLEDHTKQAFGIMNELRLSQQLCDVTLQVKYQDAPAAQFMAHKVVLASSSPVFKAMFTNGLREQGMEVVSIEGIHPKVMERLIEFAYTASISMGEKCVLHVMNGAVMYQIDSVVRACSDFLVQQLDPSNAIGIANFAEQIGCVELHQRAREYIYMHFGEVAKQEEFFNLSHCQLVTLISRDDLNVRCESEVFHACINWVKYDCEQRRFYVQALLRAVRCHSLTPNFLQMQLQKCEILQSDSRCKDYLVKIFEELTLHKPTQVMPCRAPGSGSGSGSSDTEENVKRRTHNVLERQRRNELKRSFFALRDQIPELENNEKAPKVVILKKATAYILSVQAETQKLISEIDLLRKQNEQLKHKLEQLRNSCA

SEQ ID NO: 292 - protein, 438 aa, synthetic construct
  source 1..438: note = NLS-Keap1-(GS)5-OMOMYC peptide
PAAKRVKLDGSGSGSQPDPRPSGAGACCRFLPLQSQCPEGAGDAVMYASTECKAEVTPSQHGNRTFSYTLEDHTKQAFGIMNELRLSQQLCDVTLQVKYQDAPAAQFMAHKVVLASSSPVFKAMFTNGLREQGMEVVSIEGIHPKVMERLIEFAYTASISMGEKCVLHVMNGAVMYQIDSVVRACSDFLVQQLDPSNAIGIANFAEQIGCVELHQRAREYIYMHFGEVAKQEEFFNLSHCQLVTLISRDDLNVRCESEVFHACINWVKYDCEQRRFYVQALLRAVRCHSLTPNFLQMQLQKCEILQSDSRCKDYLVKIFEELTLHKPTQVMPCRAPGSGSGSGSGSSDTEENVKRRTHNVLERQRRNELKRSFFALRDQIPELENNEKAPKVVILKKATAYILSVQAETQKLISEIDLLRKQNEQLKHKLEQLRNSCA

SEQ ID NO: 293 - protein, 440 aa, synthetic construct
  source 1..440: note = NLS-Keap1-(GS)6-OMOMYC peptide
PAAKRVKLDGSGSGSQPDPRPSGAGACCRFLPLQSQCPEGAGDAVMYASTECKAEVTPSQHGNRTFSYTLEDHTKQAFGIMNELRLSQQLCDVTLQVKYQDAPAAQFMAHKVVLASSSPVFKAMFTNGLREQGMEVVSIEGIHPKVMERLIEFAYTASISMGEKCVLHVMNGAVMYQIDSVVRACSDFLVQQLDPSNAIGIANFAEQIGCVELHQRAREYIYMHFGEVAKQEEFFNLSHCQLVTLISRDDLNVRCESEVFHACINWVKYDCEQRRFYVQALLRAVRCHSLTPNFLQMQLQKCEILQSDSRCKDYLVKIFEELTLHKPTQVMPCRAPGSGSGSGSGSGSSDTEENVKRRTHNVLERQRRNELKRSFFALRDQIPELENNEKAPKVVILKKATAYILSVQAETQKLISEIDLLRKQNEQLKHKLEQLRNSCA

SEQ ID NO: 294 - protein, 440 aa, synthetic construct
  source 1..440: note = HA-NLS-Keap1-(GS)1-OMOMYC peptide
MYPYDVPDYAPAAKRVKLDGSGSGSQPDPRPSGAGACCRFLPLQSQCPEGAGDAVMYASTECKAEVTPSQHGNRTFSYTLEDHTKQAFGIMNELRLSQQLCDVTLQVKYQDAPAAQFMAHKVVLASSSPVFKAMFTNGLREQGMEVVSIEGIHPKVMERLIEFAYTASISMGEKCVLHVMNGAVMYQIDSVVRACSDFLVQQLDPSNAIGIANFAEQIGCVELHQRAREYIYMHFGEVAKQEEFFNLSHCQLVTLISRDDLNVRCESEVFHACINWVKYDCEQRRFYVQALLRAVRCHSLTPNFLQMQLQKCEILQSDSRCKDYLVKIFEELTLHKPTQVMPCRAPGSSDTEENVKRRTHNVLERQRRNELKRSFFALRDQIPELENNEKAPKVVILKKATAYILSVQAETQKLISEIDLLRKQNEQLKHKLEQLRNSCA

SEQ ID NO: 295 - protein, 442 aa, synthetic construct
  source 1..442: note = HA-NLS-Keap1-(GS)2-OMOMYC peptide
MYPYDVPDYAPAAKRVKLDGSGSGSQPDPRPSGAGACCRFLPLQSQCPEGAGDAVMYASTECKAEVTPSQHGNRTFSYTLEDHTKQAFGIMNELRLSQQLCDVTLQVKYQDAPAAQFMAHKVVLASSSPVFKAMFTNGLREQGMEVVSIEGIHPKVMERLIEFAYTASISMGEKCVLHVMNGAVMYQIDSVVRACSDFLVQQLDPSNAIGIANFAEQIGCVELHQRAREYIYMHFGEVAKQEEFFNLSHCQLVTLISRDDLNVRCESEVFHACINWVKYDCEQRRFYVQALLRAVRCHSLTPNFLQMQLQKCEILQSDSRCKDYLVKIFEELTLHKPTQVMPCRAPGSGSSDTEENVKRRTHNVLERQRRNELKRSFFALRDQIPELENNEKAPKVVILKKATAYILSVQAETQKLISEIDLLRKQNEQLKHKLEQLRNSCA

SEQ ID NO: 296 - protein, 444 aa, synthetic construct
  source 1..444: note = HA-NLS-Keap1-(GS)3-OMOMYC peptide
MYPYDVPDYAPAAKRVKLDGSGSGSQPDPRPSGAGACCRFLPLQSQCPEGAGDAVMYASTECKAEVTPSQHGNRTFSYTLEDHTKQAFGIMNELRLSQQLCDVTLQVKYQDAPAAQFMAHKVVLASSSPVFKAMFTNGLREQGMEVVSIEGIHPKVMERLIEFAYTASISMGEKCVLHVMNGAVMYQIDSVVRACSDFLVQQLDPSNAIGIANFAEQIGCVELHQRAREYIYMHFGEVAKQEEFFNLSHCQLVTLISRDDLNVRCESEVFHACINWVKYDCEQRRFYVQALLRAVRCHSLTPNFLQMQLQKCEILQSDSRCKDYLVKIFEELTLHKPTQVMPCRAPGSGSGSSDTEENVKRRTHNVLERQRRNELKRSFFALRDQIPELENNEKAPKVVILKKATAYILSVQAETQKLISEIDLLRKQNEQLKHKLEQLRNSCA

SEQ ID NO: 297 - protein, 446 aa, synthetic construct
  source 1..446: note = HA-NLS-Keap1-(GS)4-OMOMYC peptide
MYPYDVPDYAPAAKRVKLDGSGSGSQPDPRPSGAGACCRFLPLQSQCPEGAGDAVMYASTECKAEVTPSQHGNRTFSYTLEDHTKQAFGIMNELRLSQQLCDVTLQVKYQDAPAAQFMAHKVVLASSSPVFKAMFTNGLREQGMEVVSIEGIHPKVMERLIEFAYTASISMGEKCVLHVMNGAVMYQIDSVVRACSDFLVQQLDPSNAIGIANFAEQIGCVELHQRAREYIYMHFGEVAKQEEFFNLSHCQLVTLISRDDLNVRCESEVFHACINWVKYDCEQRRFYVQALLRAVRCHSLTPNFLQMQLQKCEILQSDSRCKDYLVKIFEELTLHKPTQVMPCRAPGSGSGSGSSDTEENVKRRTHNVLERQRRNELKRSFFALRDQIPELENNEKAPKVVILKKATAYILSVQAETQKLISEIDLLRKQNEQLKHKLEQLRNSCA

SEQ ID NO: 298 - protein, 448 aa, synthetic construct
  source 1..448: note = HA-NLS-Keap1-(GS)5-OMOMYC peptide
MYPYDVPDYAPAAKRVKLDGSGSGSQPDPRPSGAGACCRFLPLQSQCPEGAGDAVMYASTECKAEVTPSQHGNRTFSYTLEDHTKQAFGIMNELRLSQQLCDVTLQVKYQDAPAAQFMAHKVVLASSSPVFKAMFTNGLREQGMEVVSIEGIHPKVMERLIEFAYTASISMGEKCVLHVMNGAVMYQIDSVVRACSDFLVQQLDPSNAIGIANFAEQIGCVELHQRAREYIYMHFGEVAKQEEFFNLSHCQLVTLISRDDLNVRCESEVFHACINWVKYDCEQRRFYVQALLRAVRCHSLTPNFLQMQLQKCEILQSDSRCKDYLVKIFEELTLHKPTQVMPCRAPGSGSGSGSGSSDTEENVKRRTHNVLERQRRNELKRSFFALRDQIPELENNEKAPKVVILKKATAYILSVQAETQKLISEIDLLRKQNEQLKHKLEQLRNSCA

SEQ ID NO: 299 - protein, 450 aa, synthetic construct
  source 1..450: note = HA-NLS-Keap1-(GS)6-OMOMYC peptide
MYPYDVPDYAPAAKRVKLDGSGSGSQPDPRPSGAGACCRFLPLQSQCPEGAGDAVMYASTECKAEVTPSQHGNRTFSYTLEDHTKQAFGIMNELRLSQQLCDVTLQVKYQDAPAAQFMAHKVVLASSSPVFKAMFTNGLREQGMEVVSIEGIHPKVMERLIEFAYTASISMGEKCVLHVMNGAVMYQIDSVVRACSDFLVQQLDPSNAIGIANFAEQIGCVELHQRAREYIYMHFGEVAKQEEFFNLSHCQLVTLISRDDLNVRCESEVFHACINWVKYDCEQRRFYVQALLRAVRCHSLTPNFLQMQLQKCEILQSDSRCKDYLVKIFEELTLHKPTQVMPCRAPGSGSGSGSGSGSSDTEENVKRRTHNVLERQRRNELKRSFFALRDQIPELENNEKAPKVVILKKATAYILSVQAETQKLISEIDLLRKQNEQLKHKLEQLRNSCA

SEQ ID NO: 300 - protein, 236 aa, synthetic construct
  source 1..236: note = NLS-RNF125-(GS)1-OMOMYC peptide
PAAKRVKLDGSGSGSGSVLSTDSGKSAPASATARALERRRDPELPVTSFDCAVCLEVLHQPVRTRCGHVFCRSCIATSLKNNKWTCPYCRAYLPSEGVPATDVAKRMKSEYKNCAECDTLVCLSEMRAHIRTCQKYIDKYGPGSSDTEENVKRRTHNVLERQRRNELKRSFFALRDQIPELENNEKAPKVVILKKATAYILSVQAETQKLISEIDLLRKQNEQLKHKLEQLRNSCA

SEQ ID NO: 301 - protein, 238 aa, synthetic construct
  source 1..238: note = NLS-RNF125-(GS)2-OMOMYC peptide
PAAKRVKLDGSGSGSGSVLSTDSGKSAPASATARALERRRDPELPVTSFDCAVCLEVLHQPVRTRCGHVFCRSCIATSLKNNKWTCPYCRAYLPSEGVPATDVAKRMKSEYKNCAECDTLVCLSEMRAHIRTCQKYIDKYGPGSGSSDTEENVKRRTHNVLERQRRNELKRSFFALRDQIPELENNEKAPKVVILKKATAYILSVQAETQKLISEIDLLRKQNEQLKHKLEQLRNSCA

SEQ ID NO: 302 - protein, 240 aa, synthetic construct
  source 1..240: note = NLS-RNF125-(GS)3-OMOMYC peptide
PAAKRVKLDGSGSGSGSVLSTDSGKSAPASATARALERRRDPELPVTSFDCAVCLEVLHQPVRTRCGHVFCRSCIATSLKNNKWTCPYCRAYLPSEGVPATDVAKRMKSEYKNCAECDTLVCLSEMRAHIRTCQKYIDKYGPGSGSGSSDTEENVKRRTHNVLERQRRNELKRSFFALRDQIPELENNEKAPKVVILKKATAYILSVQAETQKLISEIDLLRKQNEQLKHKLEQLRNSCA

SEQ ID NO: 303 - protein, 242 aa, synthetic construct
  source 1..242: note = NLS-RNF125-(GS)4-OMOMYC peptide
PAAKRVKLDGSGSGSGSVLSTDSGKSAPASATARALERRRDPELPVTSFDCAVCLEVLHQPVRTRCGHVFCRSCIATSLKNNKWTCPYCRAYLPSEGVPATDVAKRMKSEYKNCAECDTLVCLSEMRAHIRTCQKYIDKYGPGSGSGSGSSDTEENVKRRTHNVLERQRRNELKRSFFALRDQIPELENNEKAPKVVILKKATAYILSVQAETQKLISEIDLLRKQNEQLKHKLEQLRNSCA

SEQ ID NO: 304 - protein, 244 aa, synthetic construct
  source 1..244: note = NLS-RNF125-(GS)5-OMOMYC peptide
PAAKRVKLDGSGSGSGSVLSTDSGKSAPASATARALERRRDPELPVTSFDCAVCLEVLHQPVRTRCGHVFCRSCIATSLKNNKWTCPYCRAYLPSEGVPATDVAKRMKSEYKNCAECDTLVCLSEMRAHIRTCQKYIDKYGPGSGSGSGSGSSDTEENVKRRTHNVLERQRRNELKRSFFALRDQIPELENNEKAPKVVILKKATAYILSVQAETQKLISEIDLLRKQNEQLKHKLEQLRNSCA

SEQ ID NO: 305 - protein, 246 aa, synthetic construct
  source 1..246: note = NLS-RNF125-(GS)6-OMOMYC peptide
PAAKRVKLDGSGSGSGSVLSTDSGKSAPASATARALERRRDPELPVTSFDCAVCLEVLHQPVRTRCGHVFCRSCIATSLKNNKWTCPYCRAYLPSEGVPATDVAKRMKSEYKNCAECDTLVCLSEMRAHIRTCQKYIDKYGPGSGSGSGSGSGSSDTEENVKRRTHNVLERQRRNELKRSFFALRDQIPELENNEKAPKVVILKKATAYILSVQAETQKLISEIDLLRKQNEQLKHKLEQLRNSCA

SEQ ID NO: 306 - protein, 246 aa, synthetic construct
  source 1..246: note = HA-NLS-RNF125-(GS)1-OMOMYC peptide
MYPYDVPDYAPAAKRVKLDGSGSGSGSVLSTDSGKSAPASATARALERRRDPELPVTSFDCAVCLEVLHQPVRTRCGHVFCRSCIATSLKNNKWTCPYCRAYLPSEGVPATDVAKRMKSEYKNCAECDTLVCLSEMRAHIRTCQKYIDKYGPGSSDTEENVKRRTHNVLERQRRNELKRSFFALRDQIPELENNEKAPKVVILKKATAYILSVQAETQKLISEIDLLRKQNEQLKHKLEQLRNSCA

SEQ ID NO: 307 - protein, 248 aa, synthetic construct
  source 1..248: note = HA-NLS-RNF125-(GS)2-OMOMYC peptide
MYPYDVPDYAPAAKRVKLDGSGSGSGSVLSTDSGKSAPASATARALERRRDPELPVTSFDCAVCLEVLHQPVRTRCGHVFCRSCIATSLKNNKWTCPYCRAYLPSEGVPATDVAKRMKSEYKNCAECDTLVCLSEMRAHIRTCQKYIDKYGPGSGSSDTEENVKRRTHNVLERQRRNELKRSFFALRDQIPELENNEKAPKVVILKKATAYILSVQAETQKLISEIDLLRKQNEQLKHKLEQLRNSCA

SEQ ID NO: 308 - protein, 250 aa, synthetic construct
  source 1..250: note = HA-NLS-RNF125-(GS)3-OMOMYC peptide
MYPYDVPDYAPAAKRVKLDGSGSGSGSVLSTDSGKSAPASATARALERRRDPELPVTSFDCAVCLEVLHQPVRTRCGHVFCRSCIATSLKNNKWTCPYCRAYLPSEGVPATDVAKRMKSEYKNCAECDTLVCLSEMRAHIRTCQKYIDKYGPGSGSGSSDTEENVKRRTHNVLERQRRNELKRSFFALRDQIPELENNEKAPKVVILKKATAYILSVQAETQKLISEIDLLRKQNEQLKHKLEQLRNSCA

SEQ ID NO: 309 - protein, 252 aa, synthetic construct
  source 1..252: note = HA-NLS-RNF125-(GS)4-OMOMYC peptide
MYPYDVPDYAPAAKRVKLDGSGSGSGSVLSTDSGKSAPASATARALERRRDPELPVTSFDCAVCLEVLHQPVRTRCGHVFCRSCIATSLKNNKWTCPYCRAYLPSEGVPATDVAKRMKSEYKNCAECDTLVCLSEMRAHIRTCQKYIDKYGPGSGSGSGSSDTEENVKRRTHNVLERQRRNELKRSFFALRDQIPELENNEKAPKVVILKKATAYILSVQAETQKLISEIDLLRKQNEQLKHKLEQLRNSCA

SEQ ID NO: 310 - protein, 254 aa, synthetic construct
  source 1..254: note = HA-NLS-RNF125-(GS)5-OMOMYC peptide
MYPYDVPDYAPAAKRVKLDGSGSGSGSVLSTDSGKSAPASATARALERRRDPELPVTSFDCAVCLEVLHQPVRTRCGHVFCRSCIATSLKNNKWTCPYCRAYLPSEGVPATDVAKRMKSEYKNCAECDTLVCLSEMRAHIRTCQKYIDKYGPGSGSGSGSGSSDTEENVKRRTHNVLERQRRNELKRSFFALRDQIPELENNEKAPKVVILKKATAYILSVQAETQKLISEIDLLRKQNEQLKHKLEQLRNSCA

SEQ ID NO: 311 - protein, 256 aa, synthetic construct
  source 1..256: note = HA-NLS-RNF125-(GS)6-OMOMYC peptide
MYPYDVPDYAPAAKRVKLDGSGSGSGSVLSTDSGKSAPASATARALERRRDPELPVTSFDCAVCLEVLHQPVRTRCGHVFCRSCIATSLKNNKWTCPYCRAYLPSEGVPATDVAKRMKSEYKNCAECDTLVCLSEMRAHIRTCQKYIDKYGPGSGSGSGSGSGSSDTEENVKRRTHNVLERQRRNELKRSFFALRDQIPELENNEKAPKVVILKKATAYILSVQAETQKLISEIDLLRKQNEQLKHKLEQLRNSCA

SEQ ID NO: 312 - protein, 336 aa, synthetic construct
  source 1..336: note = OMOMYC-(GS)1-SPOP-NLS peptide
MSDTEENVKRRTHNVLERQRRNELKRSFFALRDQIPELENNEKAPKVVILKKATAYILSVQAETQKLISEIDLLRKQNEQLKHKLEQLRNSCAGSNGLLPDDKLTLFCEVSVVQDSVNISGQNTMNMVKVPECRLADELGGLWENSRFTDCCLCVAGQEFQAHKAILAARSPVFSAMFEHEMEESKKNRVEINDVEPEVFKEMMCFIYTGKAPNLDKMADDLLAAADKYALERLKVMCEDALCSNLSVENAAEILILADLHSADQLKTQAVDFINYHASDVLETSGWKSMVVSHPHLVAEAYRSLASAQCPFLGPPRKRLKQSGSGSPAAKRVKLD

SEQ ID NO: 313 - protein, 338 aa, synthetic construct
  source 1..338: note = OMOMYC-(GS)2-SPOP-NLS peptide
MSDTEENVKRRTHNVLERQRRNELKRSFFALRDQIPELENNEKAPKVVILKKATAYILSVQAETQKLISEIDLLRKQNEQLKHKLEQLRNSCAGSGSNGLLPDDKLTLFCEVSVVQDSVNISGQNTMNMVKVPECRLADELGGLWENSRFTDCCLCVAGQEFQAHKAILAARSPVFSAMFEHEMEESKKNRVEINDVEPEVFKEMMCFIYTGKAPNLDKMADDLLAAADKYALERLKVMCEDALCSNLSVENAAEILILADLHSADQLKTQAVDFINYHASDVLETSGWKSMVVSHPHLVAEAYRSLASAQCPFLGPPRKRLKQSGSGSPAAKRVKLD

SEQ ID NO: 314 - protein, 340 aa, synthetic construct
  source 1..340: note = OMOMYC-(GS)3-SPOP-NLS peptide
MSDTEENVKRRTHNVLERQRRNELKRSFFALRDQIPELENNEKAPKVVILKKATAYILSVQAETQKLISEIDLLRKQNEQLKHKLEQLRNSCAGSGSGSNGLLPDDKLTLFCEVSVVQDSVNISGQNTMNMVKVPECRLADELGGLWENSRFTDCCLCVAGQEFQAHKAILAARSPVFSAMFEHEMEESKKNRVEINDVEPEVFKEMMCFIYTGKAPNLDKMADDLLAAADKYALERLKVMCEDALCSNLSVENAAEILILADLHSADQLKTQAVDFINYHASDVLETSGWKSMVVSHPHLVAEAYRSLASAQCPFLGPPRKRLKQSGSGSPAAKRVKLD

SEQ ID NO: 315 - protein, 342 aa, synthetic construct
  source 1..342: note = OMOMYC-(GS)4-SPOP-NLS peptide
MSDTEENVKRRTHNVLERQRRNELKRSFFALRDQIPELENNEKAPKVVILKKATAYILSVQAETQKLISEIDLLRKQNEQLKHKLEQLRNSCAGSGSGSGSNGLLPDDKLTLFCEVSVVQDSVNISGQNTMNMVKVPECRLADELGGLWENSRFTDCCLCVAGQEFQAHKAILAARSPVFSAMFEHEMEESKKNRVEINDVEPEVFKEMMCFIYTGKAPNLDKMADDLLAAADKYALERLKVMCEDALCSNLSVENAAEILILADLHSADQLKTQAVDFINYHASDVLETSGWKSMVVSHPHLVAEAYRSLASAQCPFLGPPRKRLKQSGSGSPAAKRVKLD

SEQ ID NO: 316 - protein, 345 aa, synthetic construct
  source 1..345: note = OMOMYC-(GS)5-SPOP-NLS peptide
MSDTEENVKRRTHNVLERQRRNELKRSFFALRDQIPELENNEKAPKVVILKKATAYILSVQAETQKLISEIDLLRKQNEQLKHKLEQLRNSCAGSGSGSGSGSNGLLPDDKLTLFCEVSVVQDSVNISGQNTMNMVKVPECRLADELGGLWENSRFTDCCLCVAGQEFQAHKAILAARSPVFSAMFEHEMEESKKNRVEINDVEPEVFKEMMCFIYTGKAPNLDKMADDLLAAADKYALERLKVMCEDALCSNLSVENAAEILILADLHSADQLKTQAVDFINYHASDVLETSGWKSMVVSHPHLVAEAYRSLASAQCPFLGPPRKRLKQSGSGSPAAKRVKLDA

SEQ ID NO: 317 - protein, 346 aa, synthetic construct
  source 1..346: note = OMOMYC-(GS)6-SPOP-NLS peptide
MSDTEENVKRRTHNVLERQRRNELKRSFFALRDQIPELENNEKAPKVVILKKATAYILSVQAETQKLISEIDLLRKQNEQLKHKLEQLRNSCAGSGSGSGSGSGSNGLLPDDKLTLFCEVSVVQDSVNISGQNTMNMVKVPECRLADELGGLWENSRFTDCCLCVAGQEFQAHKAILAARSPVFSAMFEHEMEESKKNRVEINDVEPEVFKEMMCFIYTGKAPNLDKMADDLLAAADKYALERLKVMCEDALCSNLSVENAAEILILADLHSADQLKTQAVDFINYHASDVLETSGWKSMVVSHPHLVAEAYRSLASAQCPFLGPPRKRLKQSGSGSPAAKRVKLD

SEQ ID NO: 318 - protein, 345 aa, synthetic construct
  source 1..345: note = OMOMYC-(GS)1-SPOP-NLS-HA peptide
MSDTEENVKRRTHNVLERQRRNELKRSFFALRDQIPELENNEKAPKVVILKKATAYILSVQAETQKLISEIDLLRKQNEQLKHKLEQLRNSCAGSNGLLPDDKLTLFCEVSVVQDSVNISGQNTMNMVKVPECRLADELGGLWENSRFTDCCLCVAGQEFQAHKAILAARSPVFSAMFEHEMEESKKNRVEINDVEPEVFKEMMCFIYTGKAPNLDKMADDLLAAADKYALERLKVMCEDALCSNLSVENAAEILILADLHSADQLKTQAVDFINYHASDVLETSGWKSMVVSHPHLVAEAYRSLASAQCPFLGPPRKRLKQSGSGSPAAKRVKLDYPYDVPDYA

SEQ ID NO: 319 - protein, 347 aa, synthetic construct
  source 1..347: note = OMOMYC-(GS)2-SPOP-NLS-HA peptide
MSDTEENVKRRTHNVLERQRRNELKRSFFALRDQIPELENNEKAPKVVILKKATAYILSVQAETQKLISEIDLLRKQNEQLKHKLEQLRNSCAGSGSNGLLPDDKLTLFCEVSVVQDSVNISGQNTMNMVKVPECRLADELGGLWENSRFTDCCLCVAGQEFQAHKAILAARSPVFSAMFEHEMEESKKNRVEINDVEPEVFKEMMCFIYTGKAPNLDKMADDLLAAADKYALERLKVMCEDALCSNLSVENAAEILILADLHSADQLKTQAVDFINYHASDVLETSGWKSMVVSHPHLVAEAYRSLASAQCPFLGPPRKRLKQSGSGSPAAKRVKLDYPYDVPDYA

SEQ ID NO: 320 - protein, 349 aa, synthetic construct
  source 1..349: note = OMOMYC-(GS)3-SPOP-NLS-HA peptide
MSDTEENVKRRTHNVLERQRRNELKRSFFALRDQIPELENNEKAPKVVILKKATAYILSVQAETQKLISEIDLLRKQNEQLKHKLEQLRNSCAGSGSGSNGLLPDDKLTLFCEVSVVQDSVNISGQNTMNMVKVPECRLADELGGLWENSRFTDCCLCVAGQEFQAHKAILAARSPVFSAMFEHEMEESKKNRVEINDVEPEVFKEMMCFIYTGKAPNLDKMADDLLAAADKYALERLKVMCEDALCSNLSVENAAEILILADLHSADQLKTQAVDFINYHASDVLETSGWKSMVVSHPHLVAEAYRSLASAQCPFLGPPRKRLKQSGSGSPAAKRVKLDYPYDVPDYA

SEQ ID NO: 321 - protein, 351 aa, synthetic construct
  source 1..351: note = OMOMYC-(GS)4-SPOP-NLS-HA peptide
MSDTEENVKRRTHNVLERQRRNELKRSFFALRDQIPELENNEKAPKVVILKKATAYILSVQAETQKLISEIDLLRKQNEQLKHKLEQLRNSCAGSGSGSGSNGLLPDDKLTLFCEVSVVQDSVNISGQNTMNMVKVPECRLADELGGLWENSRFTDCCLCVAGQEFQAHKAILAARSPVFSAMFEHEMEESKKNRVEINDVEPEVFKEMMCFIYTGKAPNLDKMADDLLAAADKYALERLKVMCEDALCSNLSVENAAEILILADLHSADQLKTQAVDFINYHASDVLETSGWKSMVVSHPHLVAEAYRSLASAQCPFLGPPRKRLKQSGSGSPAAKRVKLDYPYDVPDYA

SEQ ID NO: 322 - protein, 354 aa, synthetic construct
  source 1..354: note = OMOMYC-(GS)5-SPOP-NLS-HA peptide
MSDTEENVKRRTHNVLERQRRNELKRSFFALRDQIPELENNEKAPKVVILKKATAYILSVQAETQKLISEIDLLRKQNEQLKHKLEQLRNSCAGSGSGSGSGSNGLLPDDKLTLFCEVSVVQDSVNISGQNTMNMVKVPECRLADELGGLWENSRFTDCCLCVAGQEFQAHKAILAARSPVFSAMFEHEMEESKKNRVEINDVEPEVFKEMMCFIYTGKAPNLDKMADDLLAAADKYALERLKVMCEDALCSNLSVENAAEILILADLHSADQLKTQAVDFINYHASDVLETSGWKSMVVSHPHLVAEAYRSLASAQCPFLGPPRKRLKQSGSGSPAAKRVKLDYPYDVPDYAA

SEQ ID NO: 323 - protein, 355 aa, synthetic construct
  source 1..355: note = OMOMYC-(GS)6-SPOP-NLS-HA peptide
MSDTEENVKRRTHNVLERQRRNELKRSFFALRDQIPELENNEKAPKVVILKKATAYILSVQAETQKLISEIDLLRKQNEQLKHKLEQLRNSCAGSGSGSGSGSGSNGLLPDDKLTLFCEVSVVQDSVNISGQNTMNMVKVPECRLADELGGLWENSRFTDCCLCVAGQEFQAHKAILAARSPVFSAMFEHEMEESKKNRVEINDVEPEVFKEMMCFIYTGKAPNLDKMADDLLAAADKYALERLKVMCEDALCSNLSVENAAEILILADLHSADQLKTQAVDFINYHASDVLETSGWKSMVVSHPHLVAEAYRSLASAQCPFLGPPRKRLKQSGSGSPAAKRVKLDYPYDVPDYA

SEQ ID NO: 324 - protein, 279 aa, synthetic construct
  source 1..279: note = FOXP3DBD-(GS)1-CHIP-NLS peptide
MRPPFTYATLIRWAILEAPEKQRTLNEIYHWFTRMFAFFRNHPATWKNAIRHNLSLHKCFVRVESEKGAVWTVDELEFRKKRSQRPSRGSRLNFGDDIPSALRIAKKKRWNSIEERRIHQESELHSYLSRLIAAERERELEECQRNHEGDEDDSHVRAQQACIEAKHDKYMADMDELFSQVDEKRKKRDIPDYLCGKISFELMREPCITPSGITYDRKDIEEHLQRVGHFDPVTRSPLTQEQLIPNLAMKEVIDAFISENGWVEDYGSGSPAAKRVKLD

SEQ ID NO: 325 - protein, 281 aa, synthetic construct
  source 1..281: note = FOXP3DBD-(GS)2-CHIP-NLS peptide
MRPPFTYATLIRWAILEAPEKQRTLNEIYHWFTRMFAFFRNHPATWKNAIRHNLSLHKCFVRVESEKGAVWTVDELEFRKKRSQRPSRGSGSRLNFGDDIPSALRIAKKKRWNSIEERRIHQESELHSYLSRLIAAERERELEECQRNHEGDEDDSHVRAQQACIEAKHDKYMADMDELFSQVDEKRKKRDIPDYLCGKISFELMREPCITPSGITYDRKDIEEHLQRVGHFDPVTRSPLTQEQLIPNLAMKEVIDAFISENGWVEDYGSGSPAAKRVKLD

SEQ ID NO: 326 - protein, 283 aa, synthetic construct
  source 1..283: note = FOXP3DBD-(GS)3-CHIP-NLS peptide
MRPPFTYATLIRWAILEAPEKQRTLNEIYHWFTRMFAFFRNHPATWKNAIRHNLSLHKCFVRVESEKGAVWTVDELEFRKKRSQRPSRGSGSGSRLNFGDDIPSALRIAKKKRWNSIEERRIHQESELHSYLSRLIAAERERELEECQRNHEGDEDDSHVRAQQACIEAKHDKYMADMDELFSQVDEKRKKRDIPDYLCGKISFELMREPCITPSGITYDRKDIEEHLQRVGHFDPVTRSPLTQEQLIPNLAMKEVIDAFISENGWVEDYGSGSPAAKRVKLD

SEQ ID NO: 327 - protein, 285 aa, synthetic construct
  source 1..285: note = FOXP3DBD-(GS)4-CHIP-NLS peptide
MRPPFTYATLIRWAILEAPEKQRTLNEIYHWFTRMFAFFRNHPATWKNAIRHNLSLHKCFVRVESEKGAVWTVDELEFRKKRSQRPSRGSGSGSGSRLNFGDDIPSALRIAKKKRWNSIEERRIHQESELHSYLSRLIAAERERELEECQRNHEGDEDDSHVRAQQACIEAKHDKYMADMDELFSQVDEKRKKRDIPDYLCGKISFELMREPCITPSGITYDRKDIEEHLQRVGHFDPVTRSPLTQEQLIPNLAMKEVIDAFISENGWVEDYGSGSPAAKRVKLD

SEQ ID NO: 328 - protein, 287 aa, synthetic construct
  source 1..287: note = FOXP3DBD-(GS)5-CHIP-NLS peptide
MRPPFTYATLIRWAILEAPEKQRTLNEIYHWFTRMFAFFRNHPATWKNAIRHNLSLHKCFVRVESEKGAVWTVDELEFRKKRSQRPSRGSGSGSGSGSRLNFGDDIPSALRIAKKKRWNSIEERRIHQESELHSYLSRLIAAERERELEECQRNHEGDEDDSHVRAQQACIEAKHDKYMADMDELFSQVDEKRKKRDIPDYLCGKISFELMREPCITPSGITYDRKDIEEHLQRVGHFDPVTRSPLTQEQLIPNLAMKEVIDAFISENGWVEDYGSGSPAAKRVKLD

SEQ ID NO: 329 - protein, 289 aa, synthetic construct
  source 1..289: note = FOXP3DBD-(GS)6-CHIP-NLS peptide
MRPPFTYATLIRWAILEAPEKQRTLNEIYHWFTRMFAFFRNHPATWKNAIRHNLSLHKCFVRVESEKGAVWTVDELEFRKKRSQRPSRGSGSGSGSGSGSRLNFGDDIPSALRIAKKKRWNSIEERRIHQESELHSYLSRLIAAERERELEECQRNHEGDEDDSHVRAQQACIEAKHDKYMADMDELFSQVDEKRKKRDIPDYLCGKISFELMREPCITPSGITYDRKDIEEHLQRVGHFDPVTRSPLTQEQLIPNLAMKEVIDAFISENGWVEDYGSGSPAAKRVKLD

SEQ ID NO: 330 - protein, 288 aa, synthetic construct
  source 1..288: note = FOXP3DBD-(GS)1-CHIP-NLS-HA peptide
MRPPFTYATLIRWAILEAPEKQRTLNEIYHWFTRMFAFFRNHPATWKNAIRHNLSLHKCFVRVESEKGAVWTVDELEFRKKRSQRPSRGSRLNFGDDIPSALRIAKKKRWNSIEERRIHQESELHSYLSRLIAAERERELEECQRNHEGDEDDSHVRAQQACIEAKHDKYMADMDELFSQVDEKRKKRDIPDYLCGKISFELMREPCITPSGITYDRKDIEEHLQRVGHFDPVTRSPLTQEQLIPNLAMKEVIDAFISENGWVEDYGSGSPAAKRVKLDYPYDVPDYA

SEQ ID NO: 331 - protein, 290 aa, synthetic construct
  source 1..290: note = FOXP3DBD-(GS)2-CHIP-NLS-HA peptide
MRPPFTYATLIRWAILEAPEKQRTLNEIYHWFTRMFAFFRNHPATWKNAIRHNLSLHKCFVRVESEKGAVWTVDELEFRKKRSQRPSRGSGSRLNFGDDIPSALRIAKKKRWNSIEERRIHQESELHSYLSRLIAAERERELEECQRNHEGDEDDSHVRAQQACIEAKHDKYMADMDELFSQVDEKRKKRDIPDYLCGKISFELMREPCITPSGITYDRKDIEEHLQRVGHFDPVTRSPLTQEQLIPNLAMKEVIDAFISENGWVEDYGSGSPAAKRVKLDYPYDVPDYA

SEQ ID NO: 332 - protein, 292 aa, synthetic construct
  source 1..292: note = FOXP3DBD-(GS)3-CHIP-NLS-HA peptide
MRPPFTYATLIRWAILEAPEKQRTLNEIYHWFTRMFAFFRNHPATWKNAIRHNLSLHKCFVRVESEKGAVWTVDELEFRKKRSQRPSRGSGSGSRLNFGDDIPSALRIAKKKRWNSIEERRIHQESELHSYLSRLIAAERERELEECQRNHEGDEDDSHVRAQQACIEAKHDKYMADMDELFSQVDEKRKKRDIPDYLCGKISFELMREPCITPSGITYDRKDIEEHLQRVGHFDPVTRSPLTQEQLIPNLAMKEVIDAFISENGWVEDYGSGSPAAKRVKLDYPYDVPDYA

SEQ ID NO: 333 - protein, 294 aa, synthetic construct
  source 1..294: note = FOXP3DBD-(GS)4-CHIP-NLS-HA peptide
MRPPFTYATLIRWAILEAPEKQRTLNEIYHWFTRMFAFFRNHPATWKNAIRHNLSLHKCFVRVESEKGAVWTVDELEFRKKRSQRPSRGSGSGSGSRLNFGDDIPSALRIAKKKRWNSIEERRIHQESELHSYLSRLIAAERERELEECQRNHEGDEDDSHVRAQQACIEAKHDKYMADMDELFSQVDEKRKKRDIPDYLCGKISFELMREPCITPSGITYDRKDIEEHLQRVGHFDPVTRSPLTQEQLIPNLAMKEVIDAFISENGWVEDYGSGSPAAKRVKLDYPYDVPDYA

SEQ ID NO: 334 - protein, 296 aa, synthetic construct
  source 1..296: note = FOXP3DBD-(GS)5-CHIP-NLS-HA peptide
MRPPFTYATLIRWAILEAPEKQRTLNEIYHWFTRMFAFFRNHPATWKNAIRHNLSLHKCFVRVESEKGAVWTVDELEFRKKRSQRPSRGSGSGSGSGSRLNFGDDIPSALRIAKKKRWNSIEERRIHQESELHSYLSRLIAAERERELEECQRNHEGDEDDSHVRAQQACIEAKHDKYMADMDELFSQVDEKRKKRDIPDYLCGKISFELMREPCITPSGITYDRKDIEEHLQRVGHFDPVTRSPLTQEQLIPNLAMKEVIDAFISENGWVEDYGSGSPAAKRVKLDYPYDVPDYA

SEQ ID NO: 335 - protein, 298 aa, synthetic construct
  source 1..298: note = FOXP3DBD-(GS)6-CHIP-NLS-HA peptide
MRPPFTYATLIRWAILEAPEKQRTLNEIYHWFTRMFAFFRNHPATWKNAIRHNLSLHKCFVRVESEKGAVWTVDELEFRKKRSQRPSRGSGSGSGSGSGSRLNFGDDIPSALRIAKKKRWNSIEERRIHQESELHSYLSRLIAAERERELEECQRNHEGDEDDSHVRAQQACIEAKHDKYMADMDELFSQVDEKRKKRDIPDYLCGKISFELMREPCITPSGITYDRKDIEEHLQRVGHFDPVTRSPLTQEQLIPNLAMKEVIDAFISENGWVEDYGSGSPAAKRVKLDYPYDVPDYA

SEQ ID NO: 336 - protein, 139 aa, synthetic construct
  source 1..139: note = NLS-DCAF1-(GS)1-FOXP3DBD peptide
PAAKRVKLDGSGSGSQAPINFTSRLNRRASFPKYGGVDGGCFDRHLIFSRGSRPPFTYATLIRWAILEAPEKQRTLNEIYHWFTRMFAFFRNHPATWKNAIRHNLSLHKCFVRVESEKGAVWTVDELEFRKKRSQRPSR

SEQ ID NO: 337 - protein, 141 aa, synthetic construct
  source 1..141: note = NLS-DCAF1-(GS)2-FOXP3DBD peptide
PAAKRVKLDGSGSGSQAPINFTSRLNRRASFPKYGGVDGGCFDRHLIFSRGSGSRPPFTYATLIRWAILEAPEKQRTLNEIYHWFTRMFAFFRNHPATWKNAIRHNLSLHKCFVRVESEKGAVWTVDELEFRKKRSQRPSR

SEQ ID NO: 338 - protein, 143 aa, synthetic construct
  source 1..143: note = NLS-DCAF1-(GS)3-FOXP3DBD peptide
PAAKRVKLDGSGSGSQAPINFTSRLNRRASFPKYGGVDGGCFDRHLIFSRGSGSGSRPPFTYATLIRWAILEAPEKQRTLNEIYHWFTRMFAFFRNHPATWKNAIRHNLSLHKCFVRVESEKGAVWTVDELEFRKKRSQRPSR

SEQ ID NO: 339 - protein, 145 aa, synthetic construct
  source 1..145: note = NLS-DCAF1-(GS)4-FOXP3DBD peptide
PAAKRVKLDGSGSGSQAPINFTSRLNRRASFPKYGGVDGGCFDRHLIFSRGSGSGSGSRPPFTYATLIRWAILEAPEKQRTLNEIYHWFTRMFAFFRNHPATWKNAIRHNLSLHKCFVRVESEKGAVWTVDELEFRKKRSQRPSR

SEQ ID NO: 340 - protein, 147 aa, synthetic construct
  source 1..147: note = NLS-DCAF1-(GS)5-FOXP3DBD peptide
PAAKRVKLDGSGSGSQAPINFTSRLNRRASFPKYGGVDGGCFDRHLIFSRGSGSGSGSGSRPPFTYATLIRWAILEAPEKQRTLNEIYHWFTRMFAFFRNHPATWKNAIRHNLSLHKCFVRVESEKGAVWTVDELEFRKKRSQRPSR

SEQ ID NO: 341 - protein, 149 aa, synthetic construct
  source 1..149: note = NLS-DCAF1-(GS)6-FOXP3DBD peptide
PAAKRVKLDGSGSGSQAPINFTSRLNRRASFPKYGGVDGGCFDRHLIFSRGSGSGSGSGSGSRPPFTYATLIRWAILEAPEKQRTLNEIYHWFTRMFAFFRNHPATWKNAIRHNLSLHKCFVRVESEKGAVWTVDELEFRKKRSQRPSR

SEQ ID NO: 342 - protein, 149 aa, synthetic construct
  source 1..149: note = HA-NLS-DCAF1-(GS)1-FOXP3DBD peptide
MYPYDVPDYAPAAKRVKLDGSGSGSQAPINFTSRLNRRASFPKYGGVDGGCFDRHLIFSRGSRPPFTYATLIRWAILEAPEKQRTLNEIYHWFTRMFAFFRNHPATWKNAIRHNLSLHKCFVRVESEKGAVWTVDELEFRKKRSQRPSR

SEQ ID NO: 343 - protein, 151 aa, synthetic construct
  source 1..151: note = HA-NLS-DCAF1-(GS)2-FOXP3DBD peptide
MYPYDVPDYAPAAKRVKLDGSGSGSQAPINFTSRLNRRASFPKYGGVDGGCFDRHLIFSRGSGSRPPFTYATLIRWAILEAPEKQRTLNEIYHWFTRMFAFFRNHPATWKNAIRHNLSLHKCFVRVESEKGAVWTVDELEFRKKRSQRPSR

SEQ ID NO: 344 - protein, 153 aa, synthetic construct
  source 1..153: note = HA-NLS-DCAF1-(GS)3-FOXP3DBD peptide
MYPYDVPDYAPAAKRVKLDGSGSGSQAPINFTSRLNRRASFPKYGGVDGGCFDRHLIFSRGSGSGSRPPFTYATLIRWAILEAPEKQRTLNEIYHWFTRMFAFFRNHPATWKNAIRHNLSLHKCFVRVESEKGAVWTVDELEFRKKRSQRPSR

SEQ ID NO: 345 - protein, 155 aa, synthetic construct
  source 1..155: note = HA-NLS-DCAF1-(GS)4-FOXP3DBD peptide
MYPYDVPDYAPAAKRVKLDGSGSGSQAPINFTSRLNRRASFPKYGGVDGGCFDRHLIFSRGSGSGSGSRPPFTYATLIRWAILEAPEKQRTLNEIYHWFTRMFAFFRNHPATWKNAIRHNLSLHKCFVRVESEKGAVWTVDELEFRKKRSQRPSR

SEQ ID NO: 346 - protein, 157 aa, synthetic construct
  source 1..157: note = HA-NLS-DCAF1-(GS)5-FOXP3DBD peptide
MYPYDVPDYAPAAKRVKLDGSGSGSQAPINFTSRLNRRASFPKYGGVDGGCFDRHLIFSRGSGSGSGSGSRPPFTYATLIRWAILEAPEKQRTLNEIYHWFTRMFAFFRNHPATWKNAIRHNLSLHKCFVRVESEKGAVWTVDELEFRKKRSQRPSR

SEQ ID NO: 347 - protein, 159 aa, synthetic construct
  source 1..159: note = HA-NLS-DCAF1-(GS)6-FOXP3DBD peptide
MYPYDVPDYAPAAKRVKLDGSGSGSQAPINFTSRLNRRASFPKYGGVDGGCFDRHLIFSRGSGSGSGSGSGSRPPFTYATLIRWAILEAPEKQRTLNEIYHWFTRMFAFFRNHPATWKNAIRHNLSLHKCFVRVESEKGAVWTVDELEFRKKRSQRPSR

SEQ ID NO: 348 - protein, 460 aa, synthetic construct
  source 1..460: note = NLS-FOXP3DBD-(GS)1-E6AP peptide
PAAKRVKLDGSGSGSRPPFTYATLIRWAILEAPEKQRTLNEIYHWFTRMFAFFRNHPATWKNAIRHNLSLHKCFVRVESEKGAVWTVDELEFRKKRSQRPSRGSNPYLRLKVRRDHIIDDALVRLEMIAMENPADLKKQLYVEFEGEQGVDEGGVSKEFFQLVVEEIFNPDIGMFTYDESTKLFWFNPSSFETEGQFTLIGIVLGLAIYNNCILDVHFPMVVYRKLMGKKGTFRDLGDSHPVLYQSLKDLLEYEGNVEDDMMITFQISQTDLFGNPMMYDLKENGDKIPITNENRKEFVNLYSDYILNKSVEKQFKAFRRGFHMVTNESPLKYLFRPEEIELLICGSRNLDFQALEETTEYDGGYTRDSVLIREFWEIVHSFTDEQKRLFLQFTTGTDRAPVGGLGKLKMIIAKNGPDTERLPTSHTCFNVLLLPEYSSKEKLKERLLKAITYAKGFGML

SEQ ID NO: 349 - protein, 462 aa, synthetic construct
  source 1..462: note = NLS-FOXP3DBD-(GS)2-E6AP peptide
PAAKRVKLDGSGSGSRPPFTYATLIRWAILEAPEKQRTLNEIYHWFTRMFAFFRNHPATWKNAIRHNLSLHKCFVRVESEKGAVWTVDELEFRKKRSQRPSRGSGSNPYLRLKVRRDHIIDDALVRLEMIAMENPADLKKQLYVEFEGEQGVDEGGVSKEFFQLVVEEIFNPDIGMFTYDESTKLFWFNPSSFETEGQFTLIGIVLGLAIYNNCILDVHFPMVVYRKLMGKKGTFRDLGDSHPVLYQSLKDLLEYEGNVEDDMMITFQISQTDLFGNPMMYDLKENGDKIPITNENRKEFVNLYSDYILNKSVEKQFKAFRRGFHMVTNESPLKYLFRPEEIELLICGSRNLDFQALEETTEYDGGYTRDSVLIREFWEIVHSFTDEQKRLFLQFTTGTDRAPVGGLGKLKMIIAKNGPDTERLPTSHTCFNVLLLPEYSSKEKLKERLLKAITYAKGFGML

SEQ ID NO: 350 - protein, 464 aa, synthetic construct
  source 1..464: note = NLS-FOXP3DBD-(GS)3-E6AP peptide
PAAKRVKLDGSGSGSRPPFTYATLIRWAILEAPEKQRTLNEIYHWFTRMFAFFRNHPATWKNAIRHNLSLHKCFVRVESEKGAVWTVDELEFRKKRSQRPSRGSGSGSNPYLRLKVRRDHIIDDALVRLEMIAMENPADLKKQLYVEFEGEQGVDEGGVSKEFFQLVVEEIFNPDIGMFTYDESTKLFWFNPSSFETEGQFTLIGIVLGLAIYNNCILDVHFPMVVYRKLMGKKGTFRDLGDSHPVLYQSLKDLLEYEGNVEDDMMITFQISQTDLFGNPMMYDLKENGDKIPITNENRKEFVNLYSDYILNKSVEKQFKAFRRGFHMVTNESPLKYLFRPEEIELLICGSRNLDFQALEETTEYDGGYTRDSVLIREFWEIVHSFTDEQKRLFLQFTTGTDRAPVGGLGKLKMIIAKNGPDTERLPTSHTCFNVLLLPEYSSKEKLKERLLKAITYAKGFGML

SEQ ID NO: 351 - protein, 466 aa, synthetic construct
  source 1..466: note = NLS-FOXP3DBD-(GS)4-E6AP peptide
PAAKRVKLDGSGSGSRPPFTYATLIRWAILEAPEKQRTLNEIYHWFTRMFAFFRNHPATWKNAIRHNLSLHKCFVRVESEKGAVWTVDELEFRKKRSQRPSRGSGSGSGSNPYLRLKVRRDHIIDDALVRLEMIAMENPADLKKQLYVEFEGEQGVDEGGVSKEFFQLVVEEIFNPDIGMFTYDESTKLFWFNPSSFETEGQFTLIGIVLGLAIYNNCILDVHFPMVVYRKLMGKKGTFRDLGDSHPVLYQSLKDLLEYEGNVEDDMMITFQISQTDLFGNPMMYDLKENGDKIPITNENRKEFVNLYSDYILNKSVEKQFKAFRRGFHMVTNESPLKYLFRPEEIELLICGSRNLDFQALEETTEYDGGYTRDSVLIREFWEIVHSFTDEQKRLFLQFTTGTDRAPVGGLGKLKMIIAKNGPDTERLPTSHTCFNVLLLPEYSSKEKLKERLLKAITYAKGFGML

SEQ ID NO: 352 - protein, 468 aa, synthetic construct
  source 1..468: note = NLS-FOXP3DBD-(GS)5-E6AP peptide
PAAKRVKLDGSGSGSRPPFTYATLIRWAILEAPEKQRTLNEIYHWFTRMFAFFRNHPATWKNAIRHNLSLHKCFVRVESEKGAVWTVDELEFRKKRSQRPSRGSGSGSGSGSNPYLRLKVRRDHIIDDALVRLEMIAMENPADLKKQLYVEFEGEQGVDEGGVSKEFFQLVVEEIFNPDIGMFTYDESTKLFWFNPSSFETEGQFTLIGIVLGLAIYNNCILDVHFPMVVYRKLMGKKGTFRDLGDSHPVLYQSLKDLLEYEGNVEDDMMITFQISQTDLFGNPMMYDLKENGDKIPITNENRKEFVNLYSDYILNKSVEKQFKAFRRGFHMVTNESPLKYLFRPEEIELLICGSRNLDFQALEETTEYDGGYTRDSVLIREFWEIVHSFTDEQKRLFLQFTTGTDRAPVGGLGKLKMIIAKNGPDTERLPTSHTCFNVLLLPEYSSKEKLKERLLKAITYAKGFGML

SEQ ID NO: 353 - protein, 470 aa, synthetic construct
  source 1..470: note = NLS-FOXP3DBD-(GS)6-E6AP peptide
PAAKRVKLDGSGSGSRPPFTYATLIRWAILEAPEKQRTLNEIYHWFTRMFAFFRNHPATWKNAIRHNLSLHKCFVRVESEKGAVWTVDELEFRKKRSQRPSRGSGSGSGSGSGSNPYLRLKVRRDHIIDDALVRLEMIAMENPADLKKQLYVEFEGEQGVDEGGVSKEFFQLVVEEIFNPDIGMFTYDESTKLFWFNPSSFETEGQFTLIGIVLGLAIYNNCILDVHFPMVVYRKLMGKKGTFRDLGDSHPVLYQSLKDLLEYEGNVEDDMMITFQISQTDLFGNPMMYDLKENGDKIPITNENRKEFVNLYSDYILNKSVEKQFKAFRRGFHMVTNESPLKYLFRPEEIELLICGSRNLDFQALEETTEYDGGYTRDSVLIREFWEIVHSFTDEQKRLFLQFTTGTDRAPVGGLGKLKMIIAKNGPDTERLPTSHTCFNVLLLPEYSSKEKLKERLLKAITYAKGFGML

SEQ ID NO: 354 - protein, 470 aa, synthetic construct
  source 1..470: note = HA-NLS-FOXP3DBD-(GS)1-E6AP peptide
MYPYDVPDYAPAAKRVKLDGSGSGSRPPFTYATLIRWAILEAPEKQRTLNEIYHWFTRMFAFFRNHPATWKNAIRHNLSLHKCFVRVESEKGAVWTVDELEFRKKRSQRPSRGSNPYLRLKVRRDHIIDDALVRLEMIAMENPADLKKQLYVEFEGEQGVDEGGVSKEFFQLVVEEIFNPDIGMFTYDESTKLFWFNPSSFETEGQFTLIGIVLGLAIYNNCILDVHFPMVVYRKLMGKKGTFRDLGDSHPVLYQSLKDLLEYEGNVEDDMMITFQISQTDLFGNPMMYDLKENGDKIPITNENRKEFVNLYSDYILNKSVEKQFKAFRRGFHMVTNESPLKYLFRPEEIELLICGSRNLDFQALEETTEYDGGYTRDSVLIREFWEIVHSFTDEQKRLFLQFTTGTDRAPVGGLGKLKMIIAKNGPDTERLPTSHTCFNVLLLPEYSSKEKLKERLLKAITYAKGFGML

SEQ ID NO: 355 - protein, 472 aa, synthetic construct
  source 1..472: note = HA-NLS-FOXP3DBD-(GS)2-E6AP peptide
MYPYDVPDYAPAAKRVKLDGSGSGSRPPFTYATLIRWAILEAPEKQRTLNEIYHWFTRMFAFFRNHPATWKNAIRHNLSLHKCFVRVESEKGAVWTVDELEFRKKRSQRPSRGSGSNPYLRLKVRRDHIIDDALVRLEMIAMENPADLKKQLYVEFEGEQGVDEGGVSKEFFQLVVEEIFNPDIGMFTYDESTKLFWFNPSSFETEGQFTLIGIVLGLAIYNNCILDVHFPMVVYRKLMGKKGTFRDLGDSHPVLYQSLKDLLEYEGNVEDDMMITFQISQTDLFGNPMMYDLKENGDKIPITNENRKEFVNLYSDYILNKSVEKQFKAFRRGFHMVTNESPLKYLFRPEEIELLICGSRNLDFQALEETTEYDGGYTRDSVLIREFWEIVHSFTDEQKRLFLQFTTGTDRAPVGGLGKLKMIIAKNGPDTERLPTSHTCFNVLLLPEYSSKEKLKERLLKAITYAKGFGML

SEQ ID NO: 356 - protein, 474 aa, synthetic construct
  source 1..474: note = HA-NLS-FOXP3DBD-(GS)3-E6AP peptide
MYPYDVPDYAPAAKRVKLDGSGSGSRPPFTYATLIRWAILEAPEKQRTLNEIYHWFTRMFAFFRNHPATWKNAIRHNLSLHKCFVRVESEKGAVWTVDELEFRKKRSQRPSRGSGSGSNPYLRLKVRRDHIIDDALVRLEMIAMENPADLKKQLYVEFEGEQGVDEGGVSKEFFQLVVEEIFNPDIGMFTYDESTKLFWFNPSSFETEGQFTLIGIVLGLAIYNNCILDVHFPMVVYRKLMGKKGTFRDLGDSHPVLYQSLKDLLEYEGNVEDDMMITFQISQTDLFGNPMMYDLKENGDKIPITNENRKEFVNLYSDYILNKSVEKQFKAFRRGFHMVTNESPLKYLFRPEEIELLICGSRNLDFQALEETTEYDGGYTRDSVLIREFWEIVHSFTDEQKRLFLQFTTGTDRAPVGGLGKLKMIIAKNGPDTERLPTSHTCFNVLLLPEYSSKEKLKERLLKAITYAKGFGML

SEQ ID NO: 357 - protein, 476 aa, synthetic construct
  source 1..476: note = HA-NLS-FOXP3DBD-(GS)4-E6AP peptide
MYPYDVPDYAPAAKRVKLDGSGSGSRPPFTYATLIRWAILEAPEKQRTLNEIYHWFTRMFAFFRNHPATWKNAIRHNLSLHKCFVRVESEKGAVWTVDELEFRKKRSQRPSRGSGSGSGSNPYLRLKVRRDHIIDDALVRLEMIAMENPADLKKQLYVEFEGEQGVDEGGVSKEFFQLVVEEIFNPDIGMFTYDESTKLFWFNPSSFETEGQFTLIGIVLGLAIYNNCILDVHFPMVVYRKLMGKKGTFRDLGDSHPVLYQSLKDLLEYEGNVEDDMMITFQISQTDLFGNPMMYDLKENGDKIPITNENRKEFVNLYSDYILNKSVEKQFKAFRRGFHMVTNESPLKYLFRPEEIELLICGSRNLDFQALEETTEYDGGYTRDSVLIREFWEIVHSFTDEQKRLFLQFTTGTDRAPVGGLGKLKMIIAKNGPDTERLPTSHTCFNVLLLPEYSSKEKLKERLLKAITYAKGFGML

SEQ ID NO: 358 - protein, 478 aa, synthetic construct
  source 1..478: note = HA-NLS-FOXP3DBD-(GS)5-E6AP peptide
MYPYDVPDYAPAAKRVKLDGSGSGSRPPFTYATLIRWAILEAPEKQRTLNEIYHWFTRMFAFFRNHPATWKNAIRHNLSLHKCFVRVESEKGAVWTVDELEFRKKRSQRPSRGSGSGSGSGSNPYLRLKVRRDHIIDDALVRLEMIAMENPADLKKQLYVEFEGEQGVDEGGVSKEFFQLVVEEIFNPDIGMFTYDESTKLFWFNPSSFETEGQFTLIGIVLGLAIYNNCILDVHFPMVVYRKLMGKKGTFRDLGDSHPVLYQSLKDLLEYEGNVEDDMMITFQISQTDLFGNPMMYDLKENGDKIPITNENRKEFVNLYSDYILNKSVEKQFKAFRRGFHMVTNESPLKYLFRPEEIELLICGSRNLDFQALEETTEYDGGYTRDSVLIREFWEIVHSFTDEQKRLFLQFTTGTDRAPVGGLGKLKMIIAKNGPDTERLPTSHTCFNVLLLPEYSSKEKLKERLLKAITYAKGFGML

SEQ ID NO: 359 - protein, 480 aa, synthetic construct
  source 1..480: note = HA-NLS-FOXP3DBD-(GS)6-E6AP peptide
MYPYDVPDYAPAAKRVKLDGSGSGSRPPFTYATLIRWAILEAPEKQRTLNEIYHWFTRMFAFFRNHPATWKNAIRHNLSLHKCFVRVESEKGAVWTVDELEFRKKRSQRPSRGSGSGSGSGSGSNPYLRLKVRRDHIIDDALVRLEMIAMENPADLKKQLYVEFEGEQGVDEGGVSKEFFQLVVEEIFNPDIGMFTYDESTKLFWFNPSSFETEGQFTLIGIVLGLAIYNNCILDVHFPMVVYRKLMGKKGTFRDLGDSHPVLYQSLKDLLEYEGNVEDDMMITFQISQTDLFGNPMMYDLKENGDKIPITNENRKEFVNLYSDYILNKSVEKQFKAFRRGFHMVTNESPLKYLFRPEEIELLICGSRNLDFQALEETTEYDGGYTRDSVLIREFWEIVHSFTDEQKRLFLQFTTGTDRAPVGGLGKLKMIIAKNGPDTERLPTSHTCFNVLLLPEYSSKEKLKERLLKAITYAKGFGML

SEQ ID NO: 360 - protein, 456 aa, synthetic construct
  source 1..456: note = FBXW7a-(GS)1-FOXP3DBD peptide
NQELLSVGSKRRRTGGSLRGNPSSSQVDEEQMNRVVEEEQQQQLRQQEEEHTARNGEVVGVEPRPGGQNDSQQGQLEENNNRFISVDEDSSGNQEEQEEDEEHAGEQDEEDEEEEEMDQESDDFDQSDDSSREDEHTHTNSVTNSSSIVDLPVHQLSSPFYTKTTKMKRKLDHGSEVRSFSLGKKPCKVSEYTSTTGLVPCSATPTTFGDLRAANGQGQQRRRITSVQPPTGLQEWLKMFQSWSGPEKLLALDELIDSCEPTQVKHMMQVIEPQFQRDFISLLPKELALYVLSFLEPKDLLQAAQTCRYWRILAEDNLLWREKCKEEGIDEPLHIKRRKVIKPGFIHSPWKSAYIRQHRIDTNSRRGGSRPPFTYATLIRWAILEAPEKQRTLNEIYHWFTRMFAFFRNHPATWKNAIRHNLSLHKCFVRVESEKGAVWTVDELEFRKKRSQRPSR

SEQ ID NO: 361 - protein, 458 aa, synthetic construct
  source 1..458: note = FBXW7a-(GS)2-FOXP3DBD peptide
NQELLSVGSKRRRTGGSLRGNPSSSQVDEEQMNRVVEEEQQQQLRQQEEEHTARNGEVVGVEPRPGGQNDSQQGQLEENNNRFISVDEDSSGNQEEQEEDEEHAGEQDEEDEEEEEMDQESDDFDQSDDSSREDEHTHTNSVTNSSSIVDLPVHQLSSPFYTKTTKMKRKLDHGSEVRSFSLGKKPCKVSEYTSTTGLVPCSATPTTFGDLRAANGQGQQRRRITSVQPPTGLQEWLKMFQSWSGPEKLLALDELIDSCEPTQVKHMMQVIEPQFQRDFISLLPKELALYVLSFLEPKDLLQAAQTCRYWRILAEDNLLWREKCKEEGIDEPLHIKRRKVIKPGFIHSPWKSAYIRQHRIDTNSRRGGSGSRPPFTYATLIRWAILEAPEKQRTLNEIYHWFTRMFAFFRNHPATWKNAIRHNLSLHKCFVRVESEKGAVWTVDELEFRKKRSQRPSR

SEQ ID NO: 362 - protein, 460 aa, synthetic construct
  source 1..460: note = FBXW7a-(GS)3-FOXP3DBD peptide
NQELLSVGSKRRRTGGSLRGNPSSSQVDEEQMNRVVEEEQQQQLRQQEEEHTARNGEVVGVEPRPGGQNDSQQGQLEENNNRFISVDEDSSGNQEEQEEDEEHAGEQDEEDEEEEEMDQESDDFDQSDDSSREDEHTHTNSVTNSSSIVDLPVHQLSSPFYTKTTKMKRKLDHGSEVRSFSLGKKPCKVSEYTSTTGLVPCSATPTTFGDLRAANGQGQQRRRITSVQPPTGLQEWLKMFQSWSGPEKLLALDELIDSCEPTQVKHMMQVIEPQFQRDFISLLPKELALYVLSFLEPKDLLQAAQTCRYWRILAEDNLLWREKCKEEGIDEPLHIKRRKVIKPGFIHSPWKSAYIRQHRIDTNSRRGGSGSGSRPPFTYATLIRWAILEAPEKQRTLNEIYHWFTRMFAFFRNHPATWKNAIRHNLSLHKCFVRVESEKGAVWTVDELEFRKKRSQRPSR

SEQ ID NO: 363 - protein, 462 aa, synthetic construct
  source 1..462: note = FBXW7a-(GS)4-FOXP3DBD peptide
NQELLSVGSKRRRTGGSLRGNPSSSQVDEEQMNRVVEEEQQQQLRQQEEEHTARNGEVVGVEPRPGGQNDSQQGQLEENNNRFISVDEDSSGNQEEQEEDEEHAGEQDEEDEEEEEMDQESDDFDQSDDSSREDEHTHTNSVTNSSSIVDLPVHQLSSPFYTKTTKMKRKLDHGSEVRSFSLGKKPCKVSEYTSTTGLVPCSATPTTFGDLRAANGQGQQRRRITSVQPPTGLQEWLKMFQSWSGPEKLLALDELIDSCEPTQVKHMMQVIEPQFQRDFISLLPKELALYVLSFLEPKDLLQAAQTCRYWRILAEDNLLWREKCKEEGIDEPLHIKRRKVIKPGFIHSPWKSAYIRQHRIDTNSRRGGSGSGSGSRPPFTYATLIRWAILEAPEKQRTLNEIYHWFTRMFAFFRNHPATWKNAIRHNLSLHKCFVRVESEKGAVWTVDELEFRKKRSQRPSR

SEQ ID NO: 364 - protein, 464 aa, synthetic construct
  source 1..464: note = FBXW7a-(GS)5-FOXP3DBD peptide
NQELLSVGSKRRRTGGSLRGNPSSSQVDEEQMNRVVEEEQQQQLRQQEEEHTARNGEVVGVEPRPGGQNDSQQGQLEENNNRFISVDEDSSGNQEEQEEDEEHAGEQDEEDEEEEEMDQESDDFDQSDDSSREDEHTHTNSVTNSSSIVDLPVHQLSSPFYTKTTKMKRKLDHGSEVRSFSLGKKPCKVSEYTSTTGLVPCSATPTTFGDLRAANGQGQQRRRITSVQPPTGLQEWLKMFQSWSGPEKLLALDELIDSCEPTQVKHMMQVIEPQFQRDFISLLPKELALYVLSFLEPKDLLQAAQTCRYWRILAEDNLLWREKCKEEGIDEPLHIKRRKVIKPGFIHSPWKSAYIRQHRIDTNSRRGGSGSGSGSGSRPPFTYATLIRWAILEAPEKQRTLNEIYHWFTRMFAFFRNHPATWKNAIRHNLSLHKCFVRVESEKGAVWTVDELEFRKKRSQRPSR

SEQ ID NO: 365 - protein, 466 aa, synthetic construct
  source 1..466: note = FBXW7a-(GS)6-FOXP3DBD peptide
NQELLSVGSKRRRTGGSLRGNPSSSQVDEEQMNRVVEEEQQQQLRQQEEEHTARNGEVVGVEPRPGGQNDSQQGQLEENNNRFISVDEDSSGNQEEQEEDEEHAGEQDEEDEEEEEMDQESDDFDQSDDSSREDEHTHTNSVTNSSSIVDLPVHQLSSPFYTKTTKMKRKLDHGSEVRSFSLGKKPCKVSEYTSTTGLVPCSATPTTFGDLRAANGQGQQRRRITSVQPPTGLQEWLKMFQSWSGPEKLLALDELIDSCEPTQVKHMMQVIEPQFQRDFISLLPKELALYVLSFLEPKDLLQAAQTCRYWRILAEDNLLWREKCKEEGIDEPLHIKRRKVIKPGFIHSPWKSAYIRQHRIDTNSRRGGSGSGSGSGSGSRPPFTYATLIRWAILEAPEKQRTLNEIYHWFTRMFAFFRNHPATWKNAIRHNLSLHKCFVRVESEKGAVWTVDELEFRKKRSQRPSR

SEQ ID NO: 366 - protein, 466 aa, synthetic construct
  source 1..466: note = HA-FBXW7a-(GS)1-FOXP3DBD peptide
MYPYDVPDYANQELLSVGSKRRRTGGSLRGNPSSSQVDEEQMNRVVEEEQQQQLRQQEEEHTARNGEVVGVEPRPGGQNDSQQGQLEENNNRFISVDEDSSGNQEEQEEDEEHAGEQDEEDEEEEEMDQESDDFDQSDDSSREDEHTHTNSVTNSSSIVDLPVHQLSSPFYTKTTKMKRKLDHGSEVRSFSLGKKPCKVSEYTSTTGLVPCSATPTTFGDLRAANGQGQQRRRITSVQPPTGLQEWLKMFQSWSGPEKLLALDELIDSCEPTQVKHMMQVIEPQFQRDFISLLPKELALYVLSFLEPKDLLQAAQTCRYWRILAEDNLLWREKCKEEGIDEPLHIKRRKVIKPGFIHSPWKSAYIRQHRIDTNSRRGGSRPPFTYATLIRWAILEAPEKQRTLNEIYHWFTRMFAFFRNHPATWKNAIRHNLSLHKCFVRVESEKGAVWTVDELEFRKKRSQRPSR

SEQ ID NO: 367 - protein, 468 aa, synthetic construct
  source 1..468: note = HA-FBXW7a-(GS)2-FOXP3DBD peptide
MYPYDVPDYANQELLSVGSKRRRTGGSLRGNPSSSQVDEEQMNRVVEEEQQQQLRQQEEEHTARNGEVVGVEPRPGGQNDSQQGQLEENNNRFISVDEDSSGNQEEQEEDEEHAGEQDEEDEEEEEMDQESDDFDQSDDSSREDEHTHTNSVTNSSSIVDLPVHQLSSPFYTKTTKMKRKLDHGSEVRSFSLGKKPCKVSEYTSTTGLVPCSATPTTFGDLRAANGQGQQRRRITSVQPPTGLQEWLKMFQSWSGPEKLLALDELIDSCEPTQVKHMMQVIEPQFQRDFISLLPKELALYVLSFLEPKDLLQAAQTCRYWRILAEDNLLWREKCKEEGIDEPLHIKRRKVIKPGFIHSPWKSAYIRQHRIDTNSRRGGSGSRPPFTYATLIRWAILEAPEKQRTLNEIYHWFTRMFAFFRNHPATWKNAIRHNLSLHKCFVRVESEKGAVWTVDELEFRKKRSQRPSR

SEQ ID NO: 368 - protein, 470 aa, synthetic construct
  source 1..470: note = HA-FBXW7a-(GS)3-FOXP3DBD peptide
MYPYDVPDYANQELLSVGSKRRRTGGSLRGNPSSSQVDEEQMNRVVEEEQQQQLRQQEEEHTARNGEVVGVEPRPGGQNDSQQGQLEENNNRFISVDEDSSGNQEEQEEDEEHAGEQDEEDEEEEEMDQESDDFDQSDDSSREDEHTHTNSVTNSSSIVDLPVHQLSSPFYTKTTKMKRKLDHGSEVRSFSLGKKPCKVSEYTSTTGLVPCSATPTTFGDLRAANGQGQQRRRITSVQPPTGLQEWLKMFQSWSGPEKLLALDELIDSCEPTQVKHMMQVIEPQFQRDFISLLPKELALYVLSFLEPKDLLQAAQTCRYWRILAEDNLLWREKCKEEGIDEPLHIKRRKVIKPGFIHSPWKSAYIRQHRIDTNSRRGGSGSGSRPPFTYATLIRWAILEAPEKQRTLNEIYHWFTRMFAFFRNHPATWKNAIRHNLSLHKCFVRVESEKGAVWTVDELEFRKKRSQRPSR

SEQ ID NO: 369 - protein, 472 aa, synthetic construct
  source 1..472: note = HA-FBXW7a-(GS)4-FOXP3DBD peptide
MYPYDVPDYANQELLSVGSKRRRTGGSLRGNPSSSQVDEEQMNRVVEEEQQQQLRQQEEEHTARNGEVVGVEPRPGGQNDSQQGQLEENNNRFISVDEDSSGNQEEQEEDEEHAGEQDEEDEEEEEMDQESDDFDQSDDSSREDEHTHTNSVTNSSSIVDLPVHQLSSPFYTKTTKMKRKLDHGSEVRSFSLGKKPCKVSEYTSTTGLVPCSATPTTFGDLRAANGQGQQRRRITSVQPPTGLQEWLKMFQSWSGPEKLLALDELIDSCEPTQVKHMMQVIEPQFQRDFISLLPKELALYVLSFLEPKDLLQAAQTCRYWRILAEDNLLWREKCKEEGIDEPLHIKRRKVIKPGFIHSPWKSAYIRQHRIDTNSRRGGSGSGSGSRPPFTYATLIRWAILEAPEKQRTLNEIYHWFTRMFAFFRNHPATWKNAIRHNLSLHKCFVRVESEKGAVWTVDELEFRKKRSQRPSR

SEQ ID NO: 370 - protein, 474 aa, synthetic construct
  source 1..474: note = HA-FBXW7a-(GS)5-FOXP3DBD peptide
MYPYDVPDYANQELLSVGSKRRRTGGSLRGNPSSSQVDEEQMNRVVEEEQQQQLRQQEEEHTARNGEVVGVEPRPGGQNDSQQGQLEENNNRFISVDEDSSGNQEEQEEDEEHAGEQDEEDEEEEEMDQESDDFDQSDDSSREDEHTHTNSVTNSSSIVDLPVHQLSSPFYTKTTKMKRKLDHGSEVRSFSLGKKPCKVSEYTSTTGLVPCSATPTTFGDLRAANGQGQQRRRITSVQPPTGLQEWLKMFQSWSGPEKLLALDELIDSCEPTQVKHMMQVIEPQFQRDFISLLPKELALYVLSFLEPKDLLQAAQTCRYWRILAEDNLLWREKCKEEGIDEPLHIKRRKVIKPGFIHSPWKSAYIRQHRIDTNSRRGGSGSGSGSGSRPPFTYATLIRWAILEAPEKQRTLNEIYHWFTRMFAFFRNHPATWKNAIRHNLSLHKCFVRVESEKGAVWTVDELEFRKKRSQRPSR

SEQ ID NO: 371 - protein, 476 aa, synthetic construct
  source 1..476: note = HA-FBXW7a-(GS)6-FOXP3DBD peptide
MYPYDVPDYANQELLSVGSKRRRTGGSLRGNPSSSQVDEEQMNRVVEEEQQQQLRQQEEEHTARNGEVVGVEPRPGGQNDSQQGQLEENNNRFISVDEDSSGNQEEQEEDEEHAGEQDEEDEEEEEMDQESDDFDQSDDSSREDEHTHTNSVTNSSSIVDLPVHQLSSPFYTKTTKMKRKLDHGSEVRSFSLGKKPCKVSEYTSTTGLVPCSATPTTFGDLRAANGQGQQRRRITSVQPPTGLQEWLKMFQSWSGPEKLLALDELIDSCEPTQVKHMMQVIEPQFQRDFISLLPKELALYVLSFLEPKDLLQAAQTCRYWRILAEDNLLWREKCKEEGIDEPLHIKRRKVIKPGFIHSPWKSAYIRQHRIDTNSRRGGSGSGSGSGSGSRPPFTYATLIRWAILEAPEKQRTLNEIYHWFTRMFAFFRNHPATWKNAIRHNLSLHKCFVRVESEKGAVWTVDELEFRKKRSQRPSR

SEQ ID NO: 372 - protein, 425 aa, synthetic construct
  source 1..425: note = NLS-Keap1-(GS)1-FOXP3DBD peptide
PAAKRVKLDGSGSGSQPDPRPSGAGACCRFLPLQSQCPEGAGDAVMYASTECKAEVTPSQHGNRTFSYTLEDHTKQAFGIMNELRLSQQLCDVTLQVKYQDAPAAQFMAHKVVLASSSPVFKAMFTNGLREQGMEVVSIEGIHPKVMERLIEFAYTASISMGEKCVLHVMNGAVMYQIDSVVRACSDFLVQQLDPSNAIGIANFAEQIGCVELHQRAREYIYMHFGEVAKQEEFFNLSHCQLVTLISRDDLNVRCESEVFHACINWVKYDCEQRRFYVQALLRAVRCHSLTPNFLQMQLQKCEILQSDSRCKDYLVKIFEELTLHKPTQVMPCRAPGSRPPFTYATLIRWAILEAPEKQRTLNEIYHWFTRMFAFFRNHPATWKNAIRHNLSLHKCFVRVESEKGAVWTVDELEFRKKRSQRPSR

SEQ ID NO: 373 - protein, 427 aa, synthetic construct
  source 1..427: note = NLS-Keap1-(GS)2-FOXP3DBD peptide
PAAKRVKLDGSGSGSQPDPRPSGAGACCRFLPLQSQCPEGAGDAVMYASTECKAEVTPSQHGNRTFSYTLEDHTKQAFGIMNELRLSQQLCDVTLQVKYQDAPAAQFMAHKVVLASSSPVFKAMFTNGLREQGMEVVSIEGIHPKVMERLIEFAYTASISMGEKCVLHVMNGAVMYQIDSVVRACSDFLVQQLDPSNAIGIANFAEQIGCVELHQRAREYIYMHFGEVAKQEEFFNLSHCQLVTLISRDDLNVRCESEVFHACINWVKYDCEQRRFYVQALLRAVRCHSLTPNFLQMQLQKCEILQSDSRCKDYLVKIFEELTLHKPTQVMPCRAPGSGSRPPFTYATLIRWAILEAPEKQRTLNEIYHWFTRMFAFFRNHPATWKNAIRHNLSLHKCFVRVESEKGAVWTVDELEFRKKRSQRPSR

SEQ ID NO: 374 - protein, 429 aa, synthetic construct
  source 1..429: note = NLS-Keap1-(GS)3-FOXP3DBD peptide
PAAKRVKLDGSGSGSQPDPRPSGAGACCRFLPLQSQCPEGAGDAVMYASTECKAEVTPSQHGNRTFSYTLEDHTKQAFGIMNELRLSQQLCDVTLQVKYQDAPAAQFMAHKVVLASSSPVFKAMFTNGLREQGMEVVSIEGIHPKVMERLIEFAYTASISMGEKCVLHVMNGAVMYQIDSVVRACSDFLVQQLDPSNAIGIANFAEQIGCVELHQRAREYIYMHFGEVAKQEEFFNLSHCQLVTLISRDDLNVRCESEVFHACINWVKYDCEQRRFYVQALLRAVRCHSLTPNFLQMQLQKCEILQSDSRCKDYLVKIFEELTLHKPTQVMPCRAPGSGSGSRPPFTYATLIRWAILEAPEKQRTLNEIYHWFTRMFAFFRNHPATWKNAIRHNLSLHKCFVRVESEKGAVWTVDELEFRKKRSQRPSR

SEQ ID NO: 375 - protein, 431 aa, synthetic construct
  source 1..431: note = NLS-Keap1-(GS)4-FOXP3DBD peptide
PAAKRVKLDGSGSGSQPDPRPSGAGACCRFLPLQSQCPEGAGDAVMYASTECKAEVTPSQHGNRTFSYTLEDHTKQAFGIMNELRLSQQLCDVTLQVKYQDAPAAQFMAHKVVLASSSPVFKAMFTNGLREQGMEVVSIEGIHPKVMERLIEFAYTASISMGEKCVLHVMNGAVMYQIDSVVRACSDFLVQQLDPSNAIGIANFAEQIGCVELHQRAREYIYMHFGEVAKQEEFFNLSHCQLVTLISRDDLNVRCESEVFHACINWVKYDCEQRRFYVQALLRAVRCHSLTPNFLQMQLQKCEILQSDSRCKDYLVKIFEELTLHKPTQVMPCRAPGSGSGSGSRPPFTYATLIRWAILEAPEKQRTLNEIYHWFTRMFAFFRNHPATWKNAIRHNLSLHKCFVRVESEKGAVWTVDELEFRKKRSQRPSR

SEQ ID NO: 376 - protein, 433 aa, synthetic construct
  source 1..433: note = NLS-Keap1-(GS)5-FOXP3DBD peptide
PAAKRVKLDGSGSGSQPDPRPSGAGACCRFLPLQSQCPEGAGDAVMYASTECKAEVTPSQHGNRTFSYTLEDHTKQAFGIMNELRLSQQLCDVTLQVKYQDAPAAQFMAHKVVLASSSPVFKAMFTNGLREQGMEVVSIEGIHPKVMERLIEFAYTASISMGEKCVLHVMNGAVMYQIDSVVRACSDFLVQQLDPSNAIGIANFAEQIGCVELHQRAREYIYMHFGEVAKQEEFFNLSHCQLVTLISRDDLNVRCESEVFHACINWVKYDCEQRRFYVQALLRAVRCHSLTPNFLQMQLQKCEILQSDSRCKDYLVKIFEELTLHKPTQVMPCRAPGSGSGSGSGSRPPFTYATLIRWAILEAPEKQRTLNEIYHWFTRMFAFFRNHPATWKNAIRHNLSLHKCFVRVESEKGAVWTVDELEFRKKRSQRPSR

SEQ ID NO: 377 - protein, 435 aa, synthetic construct
  source 1..435: note = NLS-Keap1-(GS)6-FOXP3DBD peptide
PAAKRVKLDGSGSGSQPDPRPSGAGACCRFLPLQSQCPEGAGDAVMYASTECKAEVTPSQHGNRTFSYTLEDHTKQAFGIMNELRLSQQLCDVTLQVKYQDAPAAQFMAHKVVLASSSPVFKAMFTNGLREQGMEVVSIEGIHPKVMERLIEFAYTASISMGEKCVLHVMNGAVMYQIDSVVRACSDFLVQQLDPSNAIGIANFAEQIGCVELHQRAREYIYMHFGEVAKQEEFFNLSHCQLVTLISRDDLNVRCESEVFHACINWVKYDCEQRRFYVQALLRAVRCHSLTPNFLQMQLQKCEILQSDSRCKDYLVKIFEELTLHKPTQVMPCRAPGSGSGSGSGSGSRPPFTYATLIRWAILEAPEKQRTLNEIYHWFTRMFAFFRNHPATWKNAIRHNLSLHKCFVRVESEKGAVWTVDELEFRKKRSQRPSR

SEQ ID NO: 378 - protein, 435 aa, synthetic construct
  source 1..435: note = HA-NLS-Keap1-(GS)1-FOXP3DBD peptide
MYPYDVPDYAPAAKRVKLDGSGSGSQPDPRPSGAGACCRFLPLQSQCPEGAGDAVMYASTECKAEVTPSQHGNRTFSYTLEDHTKQAFGIMNELRLSQQLCDVTLQVKYQDAPAAQFMAHKVVLASSSPVFKAMFTNGLREQGMEVVSIEGIHPKVMERLIEFAYTASISMGEKCVLHVMNGAVMYQIDSVVRACSDFLVQQLDPSNAIGIANFAEQIGCVELHQRAREYIYMHFGEVAKQEEFFNLSHCQLVTLISRDDLNVRCESEVFHACINWVKYDCEQRRFYVQALLRAVRCHSLTPNFLQMQLQKCEILQSDSRCKDYLVKIFEELTLHKPTQVMPCRAPGSRPPFTYATLIRWAILEAPEKQRTLNEIYHWFTRMFAFFRNHPATWKNAIRHNLSLHKCFVRVESEKGAVWTVDELEFRKKRSQRPSR

SEQ ID NO: 379 - protein, 437 aa, synthetic construct
  source 1..437: note = HA-NLS-Keap1-(GS)2-FOXP3DBD peptide
MYPYDVPDYAPAAKRVKLDGSGSGSQPDPRPSGAGACCRFLPLQSQCPEGAGDAVMYASTECKAEVTPSQHGNRTFSYTLEDHTKQAFGIMNELRLSQQLCDVTLQVKYQDAPAAQFMAHKVVLASSSPVFKAMFTNGLREQGMEVVSIEGIHPKVMERLIEFAYTASISMGEKCVLHVMNGAVMYQIDSVVRACSDFLVQQLDPSNAIGIANFAEQIGCVELHQRAREYIYMHFGEVAKQEEFFNLSHCQLVTLISRDDLNVRCESEVFHACINWVKYDCEQRRFYVQALLRAVRCHSLTPNFLQMQLQKCEILQSDSRCKDYLVKIFEELTLHKPTQVMPCRAPGSGSRPPFTYATLIRWAILEAPEKQRTLNEIYHWFTRMFAFFRNHPATWKNAIRHNLSLHKCFVRVESEKGAVWTVDELEFRKKRSQRPSR

SEQ ID NO: 380 - protein, 439 aa, synthetic construct
  source 1..439: note = HA-NLS-Keap1-(GS)3-FOXP3DBD peptide
MYPYDVPDYAPAAKRVKLDGSGSGSQPDPRPSGAGACCRFLPLQSQCPEGAGDAVMYASTECKAEVTPSQHGNRTFSYTLEDHTKQAFGIMNELRLSQQLCDVTLQVKYQDAPAAQFMAHKVVLASSSPVFKAMFTNGLREQGMEVVSIEGIHPKVMERLIEFAYTASISMGEKCVLHVMNGAVMYQIDSVVRACSDFLVQQLDPSNAIGIANFAEQIGCVELHQRAREYIYMHFGEVAKQEEFFNLSHCQLVTLISRDDLNVRCESEVFHACINWVKYDCEQRRFYVQALLRAVRCHSLTPNFLQMQLQKCEILQSDSRCKDYLVKIFEELTLHKPTQVMPCRAPGSGSGSRPPFTYATLIRWAILEAPEKQRTLNEIYHWFTRMFAFFRNHPATWKNAIRHNLSLHKCFVRVESEKGAVWTVDELEFRKKRSQRPSR

SEQ ID NO: 381 - protein, 441 aa, synthetic construct
  source 1..441: note = HA-NLS-Keap1-(GS)4-FOXP3DBD peptide
MYPYDVPDYAPAAKRVKLDGSGSGSQPDPRPSGAGACCRFLPLQSQCPEGAGDAVMYASTECKAEVTPSQHGNRTFSYTLEDHTKQAFGIMNELRLSQQLCDVTLQVKYQDAPAAQFMAHKVVLASSSPVFKAMFTNGLREQGMEVVSIEGIHPKVMERLIEFAYTASISMGEKCVLHVMNGAVMYQIDSVVRACSDFLVQQLDPSNAIGIANFAEQIGCVELHQRAREYIYMHFGEVAKQEEFFNLSHCQLVTLISRDDLNVRCESEVFHACINWVKYDCEQRRFYVQALLRAVRCHSLTPNFLQMQLQKCEILQSDSRCKDYLVKIFEELTLHKPTQVMPCRAPGSGSGSGSRPPFTYATLIRWAILEAPEKQRTLNEIYHWFTRMFAFFRNHPATWKNAIRHNLSLHKCFVRVESEKGAVWTVDELEFRKKRSQRPSR

SEQ ID NO: 382 - protein, 443 aa, synthetic construct
  source 1..443: note = HA-NLS-Keap1-(GS)5-FOXP3DBD peptide
MYPYDVPDYAPAAKRVKLDGSGSGSQPDPRPSGAGACCRFLPLQSQCPEGAGDAVMYASTECKAEVTPSQHGNRTFSYTLEDHTKQAFGIMNELRLSQQLCDVTLQVKYQDAPAAQFMAHKVVLASSSPVFKAMFTNGLREQGMEVVSIEGIHPKVMERLIEFAYTASISMGEKCVLHVMNGAVMYQIDSVVRACSDFLVQQLDPSNAIGIANFAEQIGCVELHQRAREYIYMHFGEVAKQEEFFNLSHCQLVTLISRDDLNVRCESEVFHACINWVKYDCEQRRFYVQALLRAVRCHSLTPNFLQMQLQKCEILQSDSRCKDYLVKIFEELTLHKPTQVMPCRAPGSGSGSGSGSRPPFTYATLIRWAILEAPEKQRTLNEIYHWFTRMFAFFRNHPATWKNAIRHNLSLHKCFVRVESEKGAVWTVDELEFRKKRSQRPSR

SEQ ID NO: 383 - protein, 445 aa, synthetic construct
  source 1..445: note = HA-NLS-Keap1-(GS)6-FOXP3DBD peptide
MYPYDVPDYAPAAKRVKLDGSGSGSQPDPRPSGAGACCRFLPLQSQCPEGAGDAVMYASTECKAEVTPSQHGNRTFSYTLEDHTKQAFGIMNELRLSQQLCDVTLQVKYQDAPAAQFMAHKVVLASSSPVFKAMFTNGLREQGMEVVSIEGIHPKVMERLIEFAYTASISMGEKCVLHVMNGAVMYQIDSVVRACSDFLVQQLDPSNAIGIANFAEQIGCVELHQRAREYIYMHFGEVAKQEEFFNLSHCQLVTLISRDDLNVRCESEVFHACINWVKYDCEQRRFYVQALLRAVRCHSLTPNFLQMQLQKCEILQSDSRCKDYLVKIFEELTLHKPTQVMPCRAPGSGSGSGSGSGSRPPFTYATLIRWAILEAPEKQRTLNEIYHWFTRMFAFFRNHPATWKNAIRHNLSLHKCFVRVESEKGAVWTVDELEFRKKRSQRPSR

SEQ ID NO: 384 - protein, 231 aa, synthetic construct
  source 1..231: note = NLS-RNF125-(GS)1-FOXP3DBD peptide
PAAKRVKLDGSGSGSGSVLSTDSGKSAPASATARALERRRDPELPVTSFDCAVCLEVLHQPVRTRCGHVFCRSCIATSLKNNKWTCPYCRAYLPSEGVPATDVAKRMKSEYKNCAECDTLVCLSEMRAHIRTCQKYIDKYGPGSRPPFTYATLIRWAILEAPEKQRTLNEIYHWFTRMFAFFRNHPATWKNAIRHNLSLHKCFVRVESEKGAVWTVDELEFRKKRSQRPSR

SEQ ID NO: 385 - protein, 233 aa, synthetic construct
  source 1..233: note = NLS-RNF125-(GS)2-FOXP3DBD peptide
PAAKRVKLDGSGSGSGSVLSTDSGKSAPASATARALERRRDPELPVTSFDCAVCLEVLHQPVRTRCGHVFCRSCIATSLKNNKWTCPYCRAYLPSEGVPATDVAKRMKSEYKNCAECDTLVCLSEMRAHIRTCQKYIDKYGPGSGSRPPFTYATLIRWAILEAPEKQRTLNEIYHWFTRMFAFFRNHPATWKNAIRHNLSLHKCFVRVESEKGAVWTVDELEFRKKRSQRPSR

SEQ ID NO: 386 - protein, 235 aa, synthetic construct
  source 1..235: note = NLS-RNF125-(GS)3-FOXP3DBD peptide
PAAKRVKLDGSGSGSGSVLSTDSGKSAPASATARALERRRDPELPVTSFDCAVCLEVLHQPVRTRCGHVFCRSCIATSLKNNKWTCPYCRAYLPSEGVPATDVAKRMKSEYKNCAECDTLVCLSEMRAHIRTCQKYIDKYGPGSGSGSRPPFTYATLIRWAILEAPEKQRTLNEIYHWFTRMFAFFRNHPATWKNAIRHNLSLHKCFVRVESEKGAVWTVDELEFRKKRSQRPSR

SEQ ID NO: 387 - protein, 237 aa, synthetic construct
  source 1..237: note = NLS-RNF125-(GS)4-FOXP3DBD peptide
PAAKRVKLDGSGSGSGSVLSTDSGKSAPASATARALERRRDPELPVTSFDCAVCLEVLHQPVRTRCGHVFCRSCIATSLKNNKWTCPYCRAYLPSEGVPATDVAKRMKSEYKNCAECDTLVCLSEMRAHIRTCQKYIDKYGPGSGSGSGSRPPFTYATLIRWAILEAPEKQRTLNEIYHWFTRMFAFFRNHPATWKNAIRHNLSLHKCFVRVESEKGAVWTVDELEFRKKRSQRPSR

SEQ ID NO: 388 - protein, 239 aa, synthetic construct
  source 1..239: note = NLS-RNF125-(GS)5-FOXP3DBD peptide
PAAKRVKLDGSGSGSGSVLSTDSGKSAPASATARALERRRDPELPVTSFDCAVCLEVLHQPVRTRCGHVFCRSCIATSLKNNKWTCPYCRAYLPSEGVPATDVAKRMKSEYKNCAECDTLVCLSEMRAHIRTCQKYIDKYGPGSGSGSGSGSRPPFTYATLIRWAILEAPEKQRTLNEIYHWFTRMFAFFRNHPATWKNAIRHNLSLHKCFVRVESEKGAVWTVDELEFRKKRSQRPSR

SEQ ID NO: 389 - protein, 241 aa, synthetic construct
  source 1..241: note = NLS-RNF125-(GS)6-FOXP3DBD peptide
PAAKRVKLDGSGSGSGSVLSTDSGKSAPASATARALERRRDPELPVTSFDCAVCLEVLHQPVRTRCGHVFCRSCIATSLKNNKWTCPYCRAYLPSEGVPATDVAKRMKSEYKNCAECDTLVCLSEMRAHIRTCQKYIDKYGPGSGSGSGSGSGSRPPFTYATLIRWAILEAPEKQRTLNEIYHWFTRMFAFFRNHPATWKNAIRHNLSLHKCFVRVESEKGAVWTVDELEFRKKRSQRPSR

SEQ ID NO: 390 - protein, 241 aa, synthetic construct
  source 1..241: note = HA-NLS-RNF125-(GS)1-FOXP3DBD peptide
MYPYDVPDYAPAAKRVKLDGSGSGSGSVLSTDSGKSAPASATARALERRRDPELPVTSFDCAVCLEVLHQPVRTRCGHVFCRSCIATSLKNNKWTCPYCRAYLPSEGVPATDVAKRMKSEYKNCAECDTLVCLSEMRAHIRTCQKYIDKYGPGSRPPFTYATLIRWAILEAPEKQRTLNEIYHWFTRMFAFFRNHPATWKNAIRHNLSLHKCFVRVESEKGAVWTVDELEFRKKRSQRPSR

SEQ ID NO: 391 - protein, 243 aa, synthetic construct
  source 1..243: note = HA-NLS-RNF125-(GS)2-FOXP3DBD peptide
MYPYDVPDYAPAAKRVKLDGSGSGSGSVLSTDSGKSAPASATARALERRRDPELPVTSFDCAVCLEVLHQPVRTRCGHVFCRSCIATSLKNNKWTCPYCRAYLPSEGVPATDVAKRMKSEYKNCAECDTLVCLSEMRAHIRTCQKYIDKYGPGSGSRPPFTYATLIRWAILEAPEKQRTLNEIYHWFTRMFAFFRNHPATWKNAIRHNLSLHKCFVRVESEKGAVWTVDELEFRKKRSQRPSR

SEQ ID NO: 392 - protein, 245 aa, synthetic construct
  source 1..245: note = HA-NLS-RNF125-(GS)3-FOXP3DBD peptide
MYPYDVPDYAPAAKRVKLDGSGSGSGSVLSTDSGKSAPASATARALERRRDPELPVTSFDCAVCLEVLHQPVRTRCGHVFCRSCIATSLKNNKWTCPYCRAYLPSEGVPATDVAKRMKSEYKNCAECDTLVCLSEMRAHIRTCQKYIDKYGPGSGSGSRPPFTYATLIRWAILEAPEKQRTLNEIYHWFTRMFAFFRNHPATWKNAIRHNLSLHKCFVRVESEKGAVWTVDELEFRKKRSQRPSR

SEQ ID NO: 393 - protein, 247 aa, synthetic construct
  source 1..247: note = HA-NLS-RNF125-(GS)4-FOXP3DBD peptide
MYPYDVPDYAPAAKRVKLDGSGSGSGSVLSTDSGKSAPASATARALERRRDPELPVTSFDCAVCLEVLHQPVRTRCGHVFCRSCIATSLKNNKWTCPYCRAYLPSEGVPATDVAKRMKSEYKNCAECDTLVCLSEMRAHIRTCQKYIDKYGPGSGSGSGSRPPFTYATLIRWAILEAPEKQRTLNEIYHWFTRMFAFFRNHPATWKNAIRHNLSLHKCFVRVESEKGAVWTVDELEFRKKRSQRPSR

SEQ ID NO: 394 - protein, 249 aa, synthetic construct
  source 1..249: note = HA-NLS-RNF125-(GS)5-FOXP3DBD peptide
MYPYDVPDYAPAAKRVKLDGSGSGSGSVLSTDSGKSAPASATARALERRRDPELPVTSFDCAVCLEVLHQPVRTRCGHVFCRSCIATSLKNNKWTCPYCRAYLPSEGVPATDVAKRMKSEYKNCAECDTLVCLSEMRAHIRTCQKYIDKYGPGSGSGSGSGSRPPFTYATLIRWAILEAPEKQRTLNEIYHWFTRMFAFFRNHPATWKNAIRHNLSLHKCFVRVESEKGAVWTVDELEFRKKRSQRPSR

SEQ ID NO: 395 - protein, 251 aa, synthetic construct
  source 1..251: note = HA-NLS-RNF125-(GS)6-FOXP3DBD peptide
MYPYDVPDYAPAAKRVKLDGSGSGSGSVLSTDSGKSAPASATARALERRRDPELPVTSFDCAVCLEVLHQPVRTRCGHVFCRSCIATSLKNNKWTCPYCRAYLPSEGVPATDVAKRMKSEYKNCAECDTLVCLSEMRAHIRTCQKYIDKYGPGSGSGSGSGSGSRPPFTYATLIRWAILEAPEKQRTLNEIYHWFTRMFAFFRNHPATWKNAIRHNLSLHKCFVRVESEKGAVWTVDELEFRKKRSQRPSR

SEQ ID NO: 396 - protein, 331 aa, synthetic construct
  source 1..331: note = FOXP3DBD-(GS)1-SPOP-NLS peptide
MRPPFTYATLIRWAILEAPEKQRTLNEIYHWFTRMFAFFRNHPATWKNAIRHNLSLHKCFVRVESEKGAVWTVDELEFRKKRSQRPSRGSNGLLPDDKLTLFCEVSVVQDSVNISGQNTMNMVKVPECRLADELGGLWENSRFTDCCLCVAGQEFQAHKAILAARSPVFSAMFEHEMEESKKNRVEINDVEPEVFKEMMCFIYTGKAPNLDKMADDLLAAADKYALERLKVMCEDALCSNLSVENAAEILILADLHSADQLKTQAVDFINYHASDVLETSGWKSMVVSHPHLVAEAYRSLASAQCPFLGPPRKRLKQSGSGSPAAKRVKLD

SEQ ID NO: 397 - protein, 333 aa, synthetic construct
  source 1..333: note = FOXP3DBD-(GS)2-SPOP-NLS peptide
MRPPFTYATLIRWAILEAPEKQRTLNEIYHWFTRMFAFFRNHPATWKNAIRHNLSLHKCFVRVESEKGAVWTVDELEFRKKRSQRPSRGSGSNGLLPDDKLTLFCEVSVVQDSVNISGQNTMNMVKVPECRLADELGGLWENSRFTDCCLCVAGQEFQAHKAILAARSPVFSAMFEHEMEESKKNRVEINDVEPEVFKEMMCFIYTGKAPNLDKMADDLLAAADKYALERLKVMCEDALCSNLSVENAAEILILADLHSADQLKTQAVDFINYHASDVLETSGWKSMVVSHPHLVAEAYRSLASAQCPFLGPPRKRLKQSGSGSPAAKRVKLD

SEQ ID NO: 398 - protein, 335 aa, synthetic construct
  source 1..335: note = FOXP3DBD-(GS)3-SPOP-NLS peptide
MRPPFTYATLIRWAILEAPEKQRTLNEIYHWFTRMFAFFRNHPATWKNAIRHNLSLHKCFVRVESEKGAVWTVDELEFRKKRSQRPSRGSGSGSNGLLPDDKLTLFCEVSVVQDSVNISGQNTMNMVKVPECRLADELGGLWENSRFTDCCLCVAGQEFQAHKAILAARSPVFSAMFEHEMEESKKNRVEINDVEPEVFKEMMCFIYTGKAPNLDKMADDLLAAADKYALERLKVMCEDALCSNLSVENAAEILILADLHSADQLKTQAVDFINYHASDVLETSGWKSMVVSHPHLVAEAYRSLASAQCPFLGPPRKRLKQSGSGSPAAKRVKLD

SEQ ID NO: 399 - protein, 337 aa, synthetic construct
  source 1..337: note = FOXP3DBD-(GS)4-SPOP-NLS peptide
MRPPFTYATLIRWAILEAPEKQRTLNEIYHWFTRMFAFFRNHPATWKNAIRHNLSLHKCFVRVESEKGAVWTVDELEFRKKRSQRPSRGSGSGSGSNGLLPDDKLTLFCEVSVVQDSVNISGQNTMNMVKVPECRLADELGGLWENSRFTDCCLCVAGQEFQAHKAILAARSPVFSAMFEHEMEESKKNRVEINDVEPEVFKEMMCFIYTGKAPNLDKMADDLLAAADKYALERLKVMCEDALCSNLSVENAAEILILADLHSADQLKTQAVDFINYHASDVLETSGWKSMVVSHPHLVAEAYRSLASAQCPFLGPPRKRLKQSGSGSPAAKRVKLD

SEQ ID NO: 400 - protein, 340 aa, synthetic construct
  source 1..340: note = FOXP3DBD-(GS)5-SPOP-NLS peptide
MRPPFTYATLIRWAILEAPEKQRTLNEIYHWFTRMFAFFRNHPATWKNAIRHNLSLHKCFVRVESEKGAVWTVDELEFRKKRSQRPSRGSGSGSGSGSNGLLPDDKLTLFCEVSVVQDSVNISGQNTMNMVKVPECRLADELGGLWENSRFTDCCLCVAGQEFQAHKAILAARSPVFSAMFEHEMEESKKNRVEINDVEPEVFKEMMCFIYTGKAPNLDKMADDLLAAADKYALERLKVMCEDALCSNLSVENAAEILILADLHSADQLKTQAVDFINYHASDVLETSGWKSMVVSHPHLVAEAYRSLASAQCPFLGPPRKRLKQSGSGSPAAKRVKLDA

SEQ ID NO: 401 - protein, 341 aa, synthetic construct
  source 1..341: note = FOXP3DBD-(GS)6-SPOP-NLS peptide
MRPPFTYATLIRWAILEAPEKQRTLNEIYHWFTRMFAFFRNHPATWKNAIRHNLSLHKCFVRVESEKGAVWTVDELEFRKKRSQRPSRGSGSGSGSGSGSNGLLPDDKLTLFCEVSVVQDSVNISGQNTMNMVKVPECRLADELGGLWENSRFTDCCLCVAGQEFQAHKAILAARSPVFSAMFEHEMEESKKNRVEINDVEPEVFKEMMCFIYTGKAPNLDKMADDLLAAADKYALERLKVMCEDALCSNLSVENAAEILILADLHSADQLKTQAVDFINYHASDVLETSGWKSMVVSHPHLVAEAYRSLASAQCPFLGPPRKRLKQSGSGSPAAKRVKLD

SEQ ID NO: 402 - protein, 340 aa, synthetic construct
  source 1..340: note = FOXP3DBD-(GS)1-SPOP-NLS-HA peptide
MRPPFTYATLIRWAILEAPEKQRTLNEIYHWFTRMFAFFRNHPATWKNAIRHNLSLHKCFVRVESEKGAVWTVDELEFRKKRSQRPSRGSNGLLPDDKLTLFCEVSVVQDSVNISGQNTMNMVKVPECRLADELGGLWENSRFTDCCLCVAGQEFQAHKAILAARSPVFSAMFEHEMEESKKNRVEINDVEPEVFKEMMCFIYTGKAPNLDKMADDLLAAADKYALERLKVMCEDALCSNLSVENAAEILILADLHSADQLKTQAVDFINYHASDVLETSGWKSMVVSHPHLVAEAYRSLASAQCPFLGPPRKRLKQSGSGSPAAKRVKLDYPYDVPDYA

SEQ ID NO: 403 - protein, 342 aa, synthetic construct
  source 1..342: note = FOXP3DBD-(GS)2-SPOP-NLS-HA peptide
MRPPFTYATLIRWAILEAPEKQRTLNEIYHWFTRMFAFFRNHPATWKNAIRHNLSLHKCFVRVESEKGAVWTVDELEFRKKRSQRPSRGSGSNGLLPDDKLTLFCEVSVVQDSVNISGQNTMNMVKVPECRLADELGGLWENSRFTDCCLCVAGQEFQAHKAILAARSPVFSAMFEHEMEESKKNRVEINDVEPEVFKEMMCFIYTGKAPNLDKMADDLLAAADKYALERLKVMCEDALCSNLSVENAAEILILADLHSADQLKTQAVDFINYHASDVLETSGWKSMVVSHPHLVAEAYRSLASAQCPFLGPPRKRLKQSGSGSPAAKRVKLDYPYDVPDYA

SEQ ID NO: 404 - protein, 344 aa, synthetic construct
  source 1..344: note = FOXP3DBD-(GS)3-SPOP-NLS-HA peptide
MRPPFTYATLIRWAILEAPEKQRTLNEIYHWFTRMFAFFRNHPATWKNAIRHNLSLHKCFVRVESEKGAVWTVDELEFRKKRSQRPSRGSGSGSNGLLPDDKLTLFCEVSVVQDSVNISGQNTMNMVKVPECRLADELGGLWENSRFTDCCLCVAGQEFQAHKAILAARSPVFSAMFEHEMEESKKNRVEINDVEPEVFKEMMCFIYTGKAPNLDKMADDLLAAADKYALERLKVMCEDALCSNLSVENAAEILILADLHSADQLKTQAVDFINYHASDVLETSGWKSMVVSHPHLVAEAYRSLASAQCPFLGPPRKRLKQSGSGSPAAKRVKLDYPYDVPDYA

SEQ ID NO: 405 - protein, 346 aa, synthetic construct
  source 1..346: note = FOXP3DBD-(GS)4-SPOP-NLS-HA peptide
MRPPFTYATLIRWAILEAPEKQRTLNEIYHWFTRMFAFFRNHPATWKNAIRHNLSLHKCFVRVESEKGAVWTVDELEFRKKRSQRPSRGSGSGSGSNGLLPDDKLTLFCEVSVVQDSVNISGQNTMNMVKVPECRLADELGGLWENSRFTDCCLCVAGQEFQAHKAILAARSPVFSAMFEHEMEESKKNRVEINDVEPEVFKEMMCFIYTGKAPNLDKMADDLLAAADKYALERLKVMCEDALCSNLSVENAAEILILADLHSADQLKTQAVDFINYHASDVLETSGWKSMVVSHPHLVAEAYRSLASAQCPFLGPPRKRLKQSGSGSPAAKRVKLDYPYDVPDYA

SEQ ID NO: 406 - protein, 349 aa, synthetic construct
  source 1..349: note = FOXP3DBD-(GS)5-SPOP-NLS-HA peptide
MRPPFTYATLIRWAILEAPEKQRTLNEIYHWFTRMFAFFRNHPATWKNAIRHNLSLHKCFVRVESEKGAVWTVDELEFRKKRSQRPSRGSGSGSGSGSNGLLPDDKLTLFCEVSVVQDSVNISGQNTMNMVKVPECRLADELGGLWENSRFTDCCLCVAGQEFQAHKAILAARSPVFSAMFEHEMEESKKNRVEINDVEPEVFKEMMCFIYTGKAPNLDKMADDLLAAADKYALERLKVMCEDALCSNLSVENAAEILILADLHSADQLKTQAVDFINYHASDVLETSGWKSMVVSHPHLVAEAYRSLASAQCPFLGPPRKRLKQSGSGSPAAKRVKLDYPYDVPDYAA

SEQ ID NO: 407 - protein, 350 aa, synthetic construct
  source 1..350: note = FOXP3DBD-(GS)6-SPOP-NLS-HA peptide
MRPPFTYATLIRWAILEAPEKQRTLNEIYHWFTRMFAFFRNHPATWKNAIRHNLSLHKCFVRVESEKGAVWTVDELEFRKKRSQRPSRGSGSGSGSGSGSNGLLPDDKLTLFCEVSVVQDSVNISGQNTMNMVKVPECRLADELGGLWENSRFTDCCLCVAGQEFQAHKAILAARSPVFSAMFEHEMEESKKNRVEINDVEPEVFKEMMCFIYTGKAPNLDKMADDLLAAADKYALERLKVMCEDALCSNLSVENAAEILILADLHSADQLKTQAVDFINYHASDVLETSGWKSMVVSHPHLVAEAYRSLASAQCPFLGPPRKRLKQSGSGSPAAKRVKLDYPYDVPDYA

SEQ ID NO: 408 - protein, 306 aa, synthetic construct
  source 1..306: note = VL12.3-(GS)1-CHIP-NLS peptide
MGSQPVLTQSPSVSAAPRQRVTISVSGSNSNIGSNTVNWIQQLPGRAPELLMYDDDLLAPGVSDRFSGSRSGTSASLTISGLQSEDEADYYAATWDDSLNGWVFGGGTKVTVLSGGSRLNFGDDIPSALRIAKKKRWNSIEERRIHQESELHSYLSRLIAAERERELEECQRNHEGDEDDSHVRAQQACIEAKHDKYMADMDELFSQVDEKRKKRDIPDYLCGKISFELMREPCITPSGITYDRKDIEEHLQRVGHFDPVTRSPLTQEQLIPNLAMKEVIDAFISENGWVEDYGSGSPAAKRVKLD

SEQ ID NO: 409 - protein, 308 aa, synthetic construct
  source 1..308: note = VL12.3-(GS)2-CHIP-NLS peptide
MGSQPVLTQSPSVSAAPRQRVTISVSGSNSNIGSNTVNWIQQLPGRAPELLMYDDDLLAPGVSDRFSGSRSGTSASLTISGLQSEDEADYYAATWDDSLNGWVFGGGTKVTVLSGGSGSRLNFGDDIPSALRIAKKKRWNSIEERRIHQESELHSYLSRLIAAERERELEECQRNHEGDEDDSHVRAQQACIEAKHDKYMADMDELFSQVDEKRKKRDIPDYLCGKISFELMREPCITPSGITYDRKDIEEHLQRVGHFDPVTRSPLTQEQLIPNLAMKEVIDAFISENGWVEDYGSGSPAAKRVKLD

SEQ ID NO: 410 - protein, 310 aa, synthetic construct
  source 1..310: note = VL12.3-(GS)3-CHIP-NLS peptide
MGSQPVLTQSPSVSAAPRQRVTISVSGSNSNIGSNTVNWIQQLPGRAPELLMYDDDLLAPGVSDRFSGSRSGTSASLTISGLQSEDEADYYAATWDDSLNGWVFGGGTKVTVLSGGSGSGSRLNFGDDIPSALRIAKKKRWNSIEERRIHQESELHSYLSRLIAAERERELEECQRNHEGDEDDSHVRAQQACIEAKHDKYMADMDELFSQVDEKRKKRDIPDYLCGKISFELMREPCITPSGITYDRKDIEEHLQRVGHFDPVTRSPLTQEQLIPNLAMKEVIDAFISENGWVEDYGSGSPAAKRVKLD

SEQ ID NO: 411 - protein, 312 aa, synthetic construct
  source 1..312: note = VL12.3-(GS)4-CHIP-NLS peptide
MGSQPVLTQSPSVSAAPRQRVTISVSGSNSNIGSNTVNWIQQLPGRAPELLMYDDDLLAPGVSDRFSGSRSGTSASLTISGLQSEDEADYYAATWDDSLNGWVFGGGTKVTVLSGGSGSGSGSRLNFGDDIPSALRIAKKKRWNSIEERRIHQESELHSYLSRLIAAERERELEECQRNHEGDEDDSHVRAQQACIEAKHDKYMADMDELFSQVDEKRKKRDIPDYLCGKISFELMREPCITPSGITYDRKDIEEHLQRVGHFDPVTRSPLTQEQLIPNLAMKEVIDAFISENGWVEDYGSGSPAAKRVKLD

SEQ ID NO: 412 - protein, 314 aa, synthetic construct
  source 1..314: note = VL12.3-(GS)5-CHIP-NLS peptide
MGSQPVLTQSPSVSAAPRQRVTISVSGSNSNIGSNTVNWIQQLPGRAPELLMYDDDLLAPGVSDRFSGSRSGTSASLTISGLQSEDEADYYAATWDDSLNGWVFGGGTKVTVLSGGSGSGSGSGSRLNFGDDIPSALRIAKKKRWNSIEERRIHQESELHSYLSRLIAAERERELEECQRNHEGDEDDSHVRAQQACIEAKHDKYMADMDELFSQVDEKRKKRDIPDYLCGKISFELMREPCITPSGITYDRKDIEEHLQRVGHFDPVTRSPLTQEQLIPNLAMKEVIDAFISENGWVEDYGSGSPAAKRVKLD

SEQ ID NO: 413 - protein, 316 aa, synthetic construct
  source 1..316: note = VL12.3-(GS)6-CHIP-NLS peptide
MGSQPVLTQSPSVSAAPRQRVTISVSGSNSNIGSNTVNWIQQLPGRAPELLMYDDDLLAPGVSDRFSGSRSGTSASLTISGLQSEDEADYYAATWDDSLNGWVFGGGTKVTVLSGGSGSGSGSGSGSRLNFGDDIPSALRIAKKKRWNSIEERRIHQESELHSYLSRLIAAERERELEECQRNHEGDEDDSHVRAQQACIEAKHDKYMADMDELFSQVDEKRKKRDIPDYLCGKISFELMREPCITPSGITYDRKDIEEHLQRVGHFDPVTRSPLTQEQLIPNLAMKEVIDAFISENGWVEDYGSGSPAAKRVKLD

SEQ ID NO: 414 - protein, 315 aa, synthetic construct
  source 1..315: note = VL12.3-(GS)1-CHIP-NLS-HA peptide
MGSQPVLTQSPSVSAAPRQRVTISVSGSNSNIGSNTVNWIQQLPGRAPELLMYDDDLLAPGVSDRFSGSRSGTSASLTISGLQSEDEADYYAATWDDSLNGWVFGGGTKVTVLSGGSRLNFGDDIPSALRIAKKKRWNSIEERRIHQESELHSYLSRLIAAERERELEECQRNHEGDEDDSHVRAQQACIEAKHDKYMADMDELFSQVDEKRKKRDIPDYLCGKISFELMREPCITPSGITYDRKDIEEHLQRVGHFDPVTRSPLTQEQLIPNLAMKEVIDAFISENGWVEDYGSGSPAAKRVKLDYPYDVPDYA

SEQ ID NO: 415 - protein, 317 aa, synthetic construct
  source 1..317: note = VL12.3-(GS)2-CHIP-NLS-HA peptide
MGSQPVLTQSPSVSAAPRQRVTISVSGSNSNIGSNTVNWIQQLPGRAPELLMYDDDLLAPGVSDRFSGSRSGTSASLTISGLQSEDEADYYAATWDDSLNGWVFGGGTKVTVLSGGSGSRLNFGDDIPSALRIAKKKRWNSIEERRIHQESELHSYLSRLIAAERERELEECQRNHEGDEDDSHVRAQQACIEAKHDKYMADMDELFSQVDEKRKKRDIPDYLCGKISFELMREPCITPSGITYDRKDIEEHLQRVGHFDPVTRSPLTQEQLIPNLAMKEVIDAFISENGWVEDYGSGSPAAKRVKLDYPYDVPDYA

SEQ ID NO: 416 - protein, 319 aa, synthetic construct
  source 1..319: note = VL12.3-(GS)3-CHIP-NLS-HA peptide
MGSQPVLTQSPSVSAAPRQRVTISVSGSNSNIGSNTVNWIQQLPGRAPELLMYDDDLLAPGVSDRFSGSRSGTSASLTISGLQSEDEADYYAATWDDSLNGWVFGGGTKVTVLSGGSGSGSRLNFGDDIPSALRIAKKKRWNSIEERRIHQESELHSYLSRLIAAERERELEECQRNHEGDEDDSHVRAQQACIEAKHDKYMADMDELFSQVDEKRKKRDIPDYLCGKISFELMREPCITPSGITYDRKDIEEHLQRVGHFDPVTRSPLTQEQLIPNLAMKEVIDAFISENGWVEDYGSGSPAAKRVKLDYPYDVPDYA

SEQ ID NO: 417 - protein, 321 aa, synthetic construct
  source 1..321: note = VL12.3-(GS)4-CHIP-NLS-HA peptide
MGSQPVLTQSPSVSAAPRQRVTISVSGSNSNIGSNTVNWIQQLPGRAPELLMYDDDLLAPGVSDRFSGSRSGTSASLTISGLQSEDEADYYAATWDDSLNGWVFGGGTKVTVLSGGSGSGSGSRLNFGDDIPSALRIAKKKRWNSIEERRIHQESELHSYLSRLIAAERERELEECQRNHEGDEDDSHVRAQQACIEAKHDKYMADMDELFSQVDEKRKKRDIPDYLCGKISFELMREPCITPSGITYDRKDIEEHLQRVGHFDPVTRSPLTQEQLIPNLAMKEVIDAFISENGWVEDYGSGSPAAKRVKLDYPYDVPDYA

SEQ ID NO: 418 - protein, 323 aa, synthetic construct
  source 1..323: note = VL12.3-(GS)5-CHIP-NLS-HA peptide
MGSQPVLTQSPSVSAAPRQRVTISVSGSNSNIGSNTVNWIQQLPGRAPELLMYDDDLLAPGVSDRFSGSRSGTSASLTISGLQSEDEADYYAATWDDSLNGWVFGGGTKVTVLSGGSGSGSGSGSRLNFGDDIPSALRIAKKKRWNSIEERRIHQESELHSYLSRLIAAERERELEECQRNHEGDEDDSHVRAQQACIEAKHDKYMADMDELFSQVDEKRKKRDIPDYLCGKISFELMREPCITPSGITYDRKDIEEHLQRVGHFDPVTRSPLTQEQLIPNLAMKEVIDAFISENGWVEDYGSGSPAAKRVKLDYPYDVPDYA

SEQ ID NO: 419 - protein, 325 aa, synthetic construct
  source 1..325: note = VL12.3-(GS)6-CHIP-NLS-HA peptide
MGSQPVLTQSPSVSAAPRQRVTISVSGSNSNIGSNTVNWIQQLPGRAPELLMYDDDLLAPGVSDRFSGSRSGTSASLTISGLQSEDEADYYAATWDDSLNGWVFGGGTKVTVLSGGSGSGSGSGSGSRLNFGDDIPSALRIAKKKRWNSIEERRIHQESELHSYLSRLIAAERERELEECQRNHEGDEDDSHVRAQQACIEAKHDKYMADMDELFSQVDEKRKKRDIPDYLCGKISFELMREPCITPSGITYDRKDIEEHLQRVGHFDPVTRSPLTQEQLIPNLAMKEVIDAFISENGWVEDYGSGSPAAKRVKLDYPYDVPDYA

SEQ ID NO: 420 - protein, 166 aa, synthetic construct
  source 1..166: note = NLS-DCAF1-(GS)1-VL12.3 peptide
PAAKRVKLDGSGSGSQAPINFTSRLNRRASFPKYGGVDGGCFDRHLIFSRGSGSQPVLTQSPSVSAAPRQRVTISVSGSNSNIGSNTVNWIQQLPGRAPELLMYDDDLLAPGVSDRFSGSRSGTSASLTISGLQSEDEADYYAATWDDSLNGWVFGGGTKVTVLSG

SEQ ID NO: 421 - protein, 168 aa, synthetic construct
  source 1..168: note = NLS-DCAF1-(GS)2-VL12.3 peptide
PAAKRVKLDGSGSGSQAPINFTSRLNRRASFPKYGGVDGGCFDRHLIFSRGSGSGSQPVLTQSPSVSAAPRQRVTISVSGSNSNIGSNTVNWIQQLPGRAPELLMYDDDLLAPGVSDRFSGSRSGTSASLTISGLQSEDEADYYAATWDDSLNGWVFGGGTKVTVLSG

SEQ ID NO: 422 - protein, 170 aa, synthetic construct
  source 1..170: note = NLS-DCAF1-(GS)3-VL12.3 peptide
PAAKRVKLDGSGSGSQAPINFTSRLNRRASFPKYGGVDGGCFDRHLIFSRGSGSGSGSQPVLTQSPSVSAAPRQRVTISVSGSNSNIGSNTVNWIQQLPGRAPELLMYDDDLLAPGVSDRFSGSRSGTSASLTISGLQSEDEADYYAATWDDSLNGWVFGGGTKVTVLSG

SEQ ID NO: 423 - protein, 172 aa, synthetic construct
  source 1..172: note = NLS-DCAF1-(GS)4-VL12.3 peptide
PAAKRVKLDGSGSGSQAPINFTSRLNRRASFPKYGGVDGGCFDRHLIFSRGSGSGSGSGSQPVLTQSPSVSAAPRQRVTISVSGSNSNIGSNTVNWIQQLPGRAPELLMYDDDLLAPGVSDRFSGSRSGTSASLTISGLQSEDEADYYAATWDDSLNGWVFGGGTKVTVLSG

SEQ ID NO: 424 - protein, 174 aa, synthetic construct
  source 1..174: note = NLS-DCAF1-(GS)5-VL12.3 peptide
PAAKRVKLDGSGSGSQAPINFTSRLNRRASFPKYGGVDGGCFDRHLIFSRGSGSGSGSGSGSQPVLTQSPSVSAAPRQRVTISVSGSNSNIGSNTVNWIQQLPGRAPELLMYDDDLLAPGVSDRFSGSRSGTSASLTISGLQSEDEADYYAATWDDSLNGWVFGGGTKVTVLSG

SEQ ID NO: 425 - protein, 176 aa, synthetic construct
  source 1..176: note = NLS-DCAF1-(GS)6-VL12.3 peptide
PAAKRVKLDGSGSGSQAPINFTSRLNRRASFPKYGGVDGGCFDRHLIFSRGSGSGSGSGSGSGSQPVLTQSPSVSAAPRQRVTISVSGSNSNIGSNTVNWIQQLPGRAPELLMYDDDLLAPGVSDRFSGSRSGTSASLTISGLQSEDEADYYAATWDDSLNGWVFGGGTKVTVLSG

SEQ ID NO: 426 - protein, 176 aa, synthetic construct
  source 1..176: note = HA-NLS-DCAF1-(GS)1-VL12.3 peptide
MYPYDVPDYAPAAKRVKLDGSGSGSQAPINFTSRLNRRASFPKYGGVDGGCFDRHLIFSRGSGSQPVLTQSPSVSAAPRQRVTISVSGSNSNIGSNTVNWIQQLPGRAPELLMYDDDLLAPGVSDRFSGSRSGTSASLTISGLQSEDEADYYAATWDDSLNGWVFGGGTKVTVLSG

SEQ ID NO: 427 - protein, 178 aa, synthetic construct
  source 1..178: note = HA-NLS-DCAF1-(GS)2-VL12.3 peptide
MYPYDVPDYAPAAKRVKLDGSGSGSQAPINFTSRLNRRASFPKYGGVDGGCFDRHLIFSRGSGSGSQPVLTQSPSVSAAPRQRVTISVSGSNSNIGSNTVNWIQQLPGRAPELLMYDDDLLAPGVSDRFSGSRSGTSASLTISGLQSEDEADYYAATWDDSLNGWVFGGGTKVTVLSG

SEQ ID NO: 428 - protein, 180 aa, synthetic construct
  source 1..180: note = HA-NLS-DCAF1-(GS)3-VL12.3 peptide
MYPYDVPDYAPAAKRVKLDGSGSGSQAPINFTSRLNRRASFPKYGGVDGGCFDRHLIFSRGSGSGSGSQPVLTQSPSVSAAPRQRVTISVSGSNSNIGSNTVNWIQQLPGRAPELLMYDDDLLAPGVSDRFSGSRSGTSASLTISGLQSEDEADYYAATWDDSLNGWVFGGGTKVTVLSG

SEQ ID NO: 429 - protein, 182 aa, synthetic construct
  source 1..182: note = HA-NLS-DCAF1-(GS)4-VL12.3 peptide
MYPYDVPDYAPAAKRVKLDGSGSGSQAPINFTSRLNRRASFPKYGGVDGGCFDRHLIFSRGSGSGSGSGSQPVLTQSPSVSAAPRQRVTISVSGSNSNIGSNTVNWIQQLPGRAPELLMYDDDLLAPGVSDRFSGSRSGTSASLTISGLQSEDEADYYAATWDDSLNGWVFGGGTKVTVLSG

SEQ ID NO: 430 - protein, 184 aa, synthetic construct
  source 1..184: note = HA-NLS-DCAF1-(GS)5-VL12.3 peptide
MYPYDVPDYAPAAKRVKLDGSGSGSQAPINFTSRLNRRASFPKYGGVDGGCFDRHLIFSRGSGSGSGSGSGSQPVLTQSPSVSAAPRQRVTISVSGSNSNIGSNTVNWIQQLPGRAPELLMYDDDLLAPGVSDRFSGSRSGTSASLTISGLQSEDEADYYAATWDDSLNGWVFGGGTKVTVLSG

SEQ ID NO: 431 - protein, 186 aa, synthetic construct
  source 1..186: note = HA-NLS-DCAF1-(GS)6-VL12.3 peptide
MYPYDVPDYAPAAKRVKLDGSGSGSQAPINFTSRLNRRASFPKYGGVDGGCFDRHLIFSRGSGSGSGSGSGSGSQPVLTQSPSVSAAPRQRVTISVSGSNSNIGSNTVNWIQQLPGRAPELLMYDDDLLAPGVSDRFSGSRSGTSASLTISGLQSEDEADYYAATWDDSLNGWVFGGGTKVTVLSG

SEQ ID NO: 432 - protein, 487 aa, synthetic construct
  source 1..487: note = NLS-VL12.3-(GS)1-E6AP peptide
PAAKRVKLDGSGSGSGSQPVLTQSPSVSAAPRQRVTISVSGSNSNIGSNTVNWIQQLPGRAPELLMYDDDLLAPGVSDRFSGSRSGTSASLTISGLQSEDEADYYAATWDDSLNGWVFGGGTKVTVLSGGSNPYLRLKVRRDHIIDDALVRLEMIAMENPADLKKQLYVEFEGEQGVDEGGVSKEFFQLVVEEIFNPDIGMFTYDESTKLFWFNPSSFETEGQFTLIGIVLGLAIYNNCILDVHFPMVVYRKLMGKKGTFRDLGDSHPVLYQSLKDLLEYEGNVEDDMMITFQISQTDLFGNPMMYDLKENGDKIPITNENRKEFVNLYSDYILNKSVEKQFKAFRRGFHMVTNESPLKYLFRPEEIELLICGSRNLDFQALEETTEYDGGYTRDSVLIREFWEIVHSFTDEQKRLFLQFTTGTDRAPVGGLGKLKMIIAKNGPDTERLPTSHTCFNVLLLPEYSSKEKLKERLLKAITYAKGFGML

SEQ ID NO: 433 - protein, 489 aa, synthetic construct
  source 1..489: note = NLS-VL12.3-(GS)2-E6AP peptide
PAAKRVKLDGSGSGSGSQPVLTQSPSVSAAPRQRVTISVSGSNSNIGSNTVNWIQQLPGRAPELLMYDDDLLAPGVSDRFSGSRSGTSASLTISGLQSEDEADYYAATWDDSLNGWVFGGGTKVTVLSGGSGSNPYLRLKVRRDHIIDDALVRLEMIAMENPADLKKQLYVEFEGEQGVDEGGVSKEFFQLVVEEIFNPDIGMFTYDESTKLFWFNPSSFETEGQFTLIGIVLGLAIYNNCILDVHFPMVVYRKLMGKKGTFRDLGDSHPVLYQSLKDLLEYEGNVEDDMMITFQISQTDLFGNPMMYDLKENGDKIPITNENRKEFVNLYSDYILNKSVEKQFKAFRRGFHMVTNESPLKYLFRPEEIELLICGSRNLDFQALEETTEYDGGYTRDSVLIREFWEIVHSFTDEQKRLFLQFTTGTDRAPVGGLGKLKMIIAKNGPDTERLPTSHTCFNVLLLPEYSSKEKLKERLLKAITYAKGFGML

SEQ ID NO: 434 - protein, 491 aa, synthetic construct
  source 1..491: note = NLS-VL12.3-(GS)3-E6AP peptide
PAAKRVKLDGSGSGSGSQPVLTQSPSVSAAPRQRVTISVSGSNSNIGSNTVNWIQQLPGRAPELLMYDDDLLAPGVSDRFSGSRSGTSASLTISGLQSEDEADYYAATWDDSLNGWVFGGGTKVTVLSGGSGSGSNPYLRLKVRRDHIIDDALVRLEMIAMENPADLKKQLYVEFEGEQGVDEGGVSKEFFQLVVEEIFNPDIGMFTYDESTKLFWFNPSSFETEGQFTLIGIVLGLAIYNNCILDVHFPMVVYRKLMGKKGTFRDLGDSHPVLYQSLKDLLEYEGNVEDDMMITFQISQTDLFGNPMMYDLKENGDKIPITNENRKEFVNLYSDYILNKSVEKQFKAFRRGFHMVTNESPLKYLFRPEEIELLICGSRNLDFQALEETTEYDGGYTRDSVLIREFWEIVHSFTDEQKRLFLQFTTGTDRAPVGGLGKLKMIIAKNGPDTERLPTSHTCFNVLLLPEYSSKEKLKERLLKAITYAKGFGML

SEQ ID NO: 435 - protein, 493 aa, synthetic construct
  source 1..493: note = NLS-VL12.3-(GS)4-E6AP peptide
PAAKRVKLDGSGSGSGSQPVLTQSPSVSAAPRQRVTISVSGSNSNIGSNTVNWIQQLPGRAPELLMYDDDLLAPGVSDRFSGSRSGTSASLTISGLQSEDEADYYAATWDDSLNGWVFGGGTKVTVLSGGSGSGSGSNPYLRLKVRRDHIIDDALVRLEMIAMENPADLKKQLYVEFEGEQGVDEGGVSKEFFQLVVEEIFNPDIGMFTYDESTKLFWFNPSSFETEGQFTLIGIVLGLAIYNNCILDVHFPMVVYRKLMGKKGTFRDLGDSHPVLYQSLKDLLEYEGNVEDDMMITFQISQTDLFGNPMMYDLKENGDKIPITNENRKEFVNLYSDYILNKSVEKQFKAFRRGFHMVTNESPLKYLFRPEEIELLICGSRNLDFQALEETTEYDGGYTRDSVLIREFWEIVHSFTDEQKRLFLQFTTGTDRAPVGGLGKLKMIIAKNGPDTERLPTSHTCFNVLLLPEYSSKEKLKERLLKAITYAKGFGML

SEQ ID NO: 436 - protein, 495 aa, synthetic construct
  source 1..495: note = NLS-VL12.3-(GS)5-E6AP peptide
PAAKRVKLDGSGSGSGSQPVLTQSPSVSAAPRQRVTISVSGSNSNIGSNTVNWIQQLPGRAPELLMYDDDLLAPGVSDRFSGSRSGTSASLTISGLQSEDEADYYAATWDDSLNGWVFGGGTKVTVLSGGSGSGSGSGSNPYLRLKVRRDHIIDDALVRLEMIAMENPADLKKQLYVEFEGEQGVDEGGVSKEFFQLVVEEIFNPDIGMFTYDESTKLFWFNPSSFETEGQFTLIGIVLGLAIYNNCILDVHFPMVVYRKLMGKKGTFRDLGDSHPVLYQSLKDLLEYEGNVEDDMMITFQISQTDLFGNPMMYDLKENGDKIPITNENRKEFVNLYSDYILNKSVEKQFKAFRRGFHMVTNESPLKYLFRPEEIELLICGSRNLDFQALEETTEYDGGYTRDSVLIREFWEIVHSFTDEQKRLFLQFTTGTDRAPVGGLGKLKMIIAKNGPDTERLPTSHTCFNVLLLPEYSSKEKLKERLLKAITYAKGFGML

SEQ ID NO: 437 - protein, 497 aa, synthetic construct
  source 1..497: note = NLS-VL12.3-(GS)6-E6AP peptide
PAAKRVKLDGSGSGSGSQPVLTQSPSVSAAPRQRVTISVSGSNSNIGSNTVNWIQQLPGRAPELLMYDDDLLAPGVSDRFSGSRSGTSASLTISGLQSEDEADYYAATWDDSLNGWVFGGGTKVTVLSGGSGSGSGSGSGSNPYLRLKVRRDHIIDDALVRLEMIAMENPADLKKQLYVEFEGEQGVDEGGVSKEFFQLVVEEIFNPDIGMFTYDESTKLFWFNPSSFETEGQFTLIGIVLGLAIYNNCILDVHFPMVVYRKLMGKKGTFRDLGDSHPVLYQSLKDLLEYEGNVEDDMMITFQISQTDLFGNPMMYDLKENGDKIPITNENRKEFVNLYSDYILNKSVEKQFKAFRRGFHMVTNESPLKYLFRPEEIELLICGSRNLDFQALEETTEYDGGYTRDSVLIREFWEIVHSFTDEQKRLFLQFTTGTDRAPVGGLGKLKMIIAKNGPDTERLPTSHTCFNVLLLPEYSSKEKLKERLLKAITYAKGFGML

SEQ ID NO: 438 - protein, 497 aa, synthetic construct
  source 1..497: note = HA-NLS-VL12.3-(GS)1-E6AP peptide
MYPYDVPDYAPAAKRVKLDGSGSGSGSQPVLTQSPSVSAAPRQRVTISVSGSNSNIGSNTVNWIQQLPGRAPELLMYDDDLLAPGVSDRFSGSRSGTSASLTISGLQSEDEADYYAATWDDSLNGWVFGGGTKVTVLSGGSNPYLRLKVRRDHIIDDALVRLEMIAMENPADLKKQLYVEFEGEQGVDEGGVSKEFFQLVVEEIFNPDIGMFTYDESTKLFWFNPSSFETEGQFTLIGIVLGLAIYNNCILDVHFPMVVYRKLMGKKGTFRDLGDSHPVLYQSLKDLLEYEGNVEDDMMITFQISQTDLFGNPMMYDLKENGDKIPITNENRKEFVNLYSDYILNKSVEKQFKAFRRGFHMVTNESPLKYLFRPEEIELLICGSRNLDFQALEETTEYDGGYTRDSVLIREFWEIVHSFTDEQKRLFLQFTTGTDRAPVGGLGKLKMIIAKNGPDTERLPTSHTCFNVLLLPEYSSKEKLKERLLKAITYAKGFGML

SEQ ID NO: 439 - protein, 499 aa, synthetic construct
  source 1..499: note = HA-NLS-VL12.3-(GS)2-E6AP peptide
MYPYDVPDYAPAAKRVKLDGSGSGSGSQPVLTQSPSVSAAPRQRVTISVSGSNSNIGSNTVNWIQQLPGRAPELLMYDDDLLAPGVSDRFSGSRSGTSASLTISGLQSEDEADYYAATWDDSLNGWVFGGGTKVTVLSGGSGSNPYLRLKVRRDHIIDDALVRLEMIAMENPADLKKQLYVEFEGEQGVDEGGVSKEFFQLVVEEIFNPDIGMFTYDESTKLFWFNPSSFETEGQFTLIGIVLGLAIYNNCILDVHFPMVVYRKLMGKKGTFRDLGDSHPVLYQSLKDLLEYEGNVEDDMMITFQISQTDLFGNPMMYDLKENGDKIPITNENRKEFVNLYSDYILNKSVEKQFKAFRRGFHMVTNESPLKYLFRPEEIELLICGSRNLDFQALEETTEYDGGYTRDSVLIREFWEIVHSFTDEQKRLFLQFTTGTDRAPVGGLGKLKMIIAKNGPDTERLPTSHTCFNVLLLPEYSSKEKLKERLLKAITYAKGFGML

SEQ ID NO: 440 - protein, 501 aa, synthetic construct
  source 1..501: note = HA-NLS-VL12.3-(GS)3-E6AP peptide
MYPYDVPDYAPAAKRVKLDGSGSGSGSQPVLTQSPSVSAAPRQRVTISVSGSNSNIGSNTVNWIQQLPGRAPELLMYDDDLLAPGVSDRFSGSRSGTSASLTISGLQSEDEADYYAATWDDSLNGWVFGGGTKVTVLSGGSGSGSNPYLRLKVRRDHIIDDALVRLEMIAMENPADLKKQLYVEFEGEQGVDEGGVSKEFFQLVVEEIFNPDIGMFTYDESTKLFWFNPSSFETEGQFTLIGIVLGLAIYNNCILDVHFPMVVYRKLMGKKGTFRDLGDSHPVLYQSLKDLLEYEGNVEDDMMITFQISQTDLFGNPMMYDLKENGDKIPITNENRKEFVNLYSDYILNKSVEKQFKAFRRGFHMVTNESPLKYLFRPEEIELLICGSRNLDFQALEETTEYDGGYTRDSVLIREFWEIVHSFTDEQKRLFLQFTTGTDRAPVGGLGKLKMIIAKNGPDTERLPTSHTCFNVLLLPEYSSKEKLKERLLKAITYAKGFGML

SEQ ID NO: 441 - protein, 503 aa, synthetic construct
  source 1..503: note = HA-NLS-VL12.3-(GS)4-E6AP peptide
MYPYDVPDYAPAAKRVKLDGSGSGSGSQPVLTQSPSVSAAPRQRVTISVSGSNSNIGSNTVNWIQQLPGRAPELLMYDDDLLAPGVSDRFSGSRSGTSASLTISGLQSEDEADYYAATWDDSLNGWVFGGGTKVTVLSGGSGSGSGSNPYLRLKVRRDHIIDDALVRLEMIAMENPADLKKQLYVEFEGEQGVDEGGVSKEFFQLVVEEIFNPDIGMFTYDESTKLFWFNPSSFETEGQFTLIGIVLGLAIYNNCILDVHFPMVVYRKLMGKKGTFRDLGDSHPVLYQSLKDLLEYEGNVEDDMMITFQISQTDLFGNPMMYDLKENGDKIPITNENRKEFVNLYSDYILNKSVEKQFKAFRRGFHMVTNESPLKYLFRPEEIELLICGSRNLDFQALEETTEYDGGYTRDSVLIREFWEIVHSFTDEQKRLFLQFTTGTDRAPVGGLGKLKMIIAKNGPDTERLPTSHTCFNVLLLPEYSSKEKLKERLLKAITYAKGFGML

SEQ ID NO: 442 - protein, 505 aa, synthetic construct
  source 1..505: note = HA-NLS-VL12.3-(GS)5-E6AP peptide
MYPYDVPDYAPAAKRVKLDGSGSGSGSQPVLTQSPSVSAAPRQRVTISVSGSNSNIGSNTVNWIQQLPGRAPELLMYDDDLLAPGVSDRFSGSRSGTSASLTISGLQSEDEADYYAATWDDSLNGWVFGGGTKVTVLSGGSGSGSGSGSNPYLRLKVRRDHIIDDALVRLEMIAMENPADLKKQLYVEFEGEQGVDEGGVSKEFFQLVVEEIFNPDIGMFTYDESTKLFWFNPSSFETEGQFTLIGIVLGLAIYNNCILDVHFPMVVYRKLMGKKGTFRDLGDSHPVLYQSLKDLLEYEGNVEDDMMITFQISQTDLFGNPMMYDLKENGDKIPITNENRKEFVNLYSDYILNKSVEKQFKAFRRGFHMVTNESPLKYLFRPEEIELLICGSRNLDFQALEETTEYDGGYTRDSVLIREFWEIVHSFTDEQKRLFLQFTTGTDRAPVGGLGKLKMIIAKNGPDTERLPTSHTCFNVLLLPEYSSKEKLKERLLKAITYAKGFGML

SEQ ID NO: 443 - protein, 507 aa, synthetic construct
  source 1..507: note = HA-NLS-VL12.3-(GS)6-E6AP peptide
MYPYDVPDYAPAAKRVKLDGSGSGSGSQPVLTQSPSVSAAPRQRVTISVSGSNSNIGSNTVNWIQQLPGRAPELLMYDDDLLAPGVSDRFSGSRSGTSASLTISGLQSEDEADYYAATWDDSLNGWVFGGGTKVTVLSGGSGSGSGSGSGSNPYLRLKVRRDHIIDDALVRLEMIAMENPADLKKQLYVEFEGEQGVDEGGVSKEFFQLVVEEIFNPDIGMFTYDESTKLFWFNPSSFETEGQFTLIGIVLGLAIYNNCILDVHFPMVVYRKLMGKKGTFRDLGDSHPVLYQSLKDLLEYEGNVEDDMMITFQISQTDLFGNPMMYDLKENGDKIPITNENRKEFVNLYSDYILNKSVEKQFKAFRRGFHMVTNESPLKYLFRPEEIELLICGSRNLDFQALEETTEYDGGYTRDSVLIREFWEIVHSFTDEQKRLFLQFTTGTDRAPVGGLGKLKMIIAKNGPDTERLPTSHTCFNVLLLPEYSSKEKLKERLLKAITYAKGFGML

SEQ ID NO: 444 - protein, 483 aa, synthetic construct
  source 1..483: note = FBXW7a-(GS)1-VL12.3 peptide
NQELLSVGSKRRRTGGSLRGNPSSSQVDEEQMNRVVEEEQQQQLRQQEEEHTARNGEVVGVEPRPGGQNDSQQGQLEENNNRFISVDEDSSGNQEEQEEDEEHAGEQDEEDEEEEEMDQESDDFDQSDDSSREDEHTHTNSVTNSSSIVDLPVHQLSSPFYTKTTKMKRKLDHGSEVRSFSLGKKPCKVSEYTSTTGLVPCSATPTTFGDLRAANGQGQQRRRITSVQPPTGLQEWLKMFQSWSGPEKLLALDELIDSCEPTQVKHMMQVIEPQFQRDFISLLPKELALYVLSFLEPKDLLQAAQTCRYWRILAEDNLLWREKCKEEGIDEPLHIKRRKVIKPGFIHSPWKSAYIRQHRIDTNSRRGGSGSQPVLTQSPSVSAAPRQRVTISVSGSNSNIGSNTVNWIQQLPGRAPELLMYDDDLLAPGVSDRFSGSRSGTSASLTISGLQSEDEADYYAATWDDSLNGWVFGGGTKVTVLSG

SEQ ID NO: 445 - protein, 485 aa, synthetic construct
  source 1..485: note = FBXW7a-(GS)2-VL12.3 peptide
NQELLSVGSKRRRTGGSLRGNPSSSQVDEEQMNRVVEEEQQQQLRQQEEEHTARNGEVVGVEPRPGGQNDSQQGQLEENNNRFISVDEDSSGNQEEQEEDEEHAGEQDEEDEEEEEMDQESDDFDQSDDSSREDEHTHTNSVTNSSSIVDLPVHQLSSPFYTKTTKMKRKLDHGSEVRSFSLGKKPCKVSEYTSTTGLVPCSATPTTFGDLRAANGQGQQRRRITSVQPPTGLQEWLKMFQSWSGPEKLLALDELIDSCEPTQVKHMMQVIEPQFQRDFISLLPKELALYVLSFLEPKDLLQAAQTCRYWRILAEDNLLWREKCKEEGIDEPLHIKRRKVIKPGFIHSPWKSAYIRQHRIDTNSRRGGSGSGSQPVLTQSPSVSAAPRQRVTISVSGSNSNIGSNTVNWIQQLPGRAPELLMYDDDLLAPGVSDRFSGSRSGTSASLTISGLQSEDEADYYAATWDDSLNGWVFGGGTKVTVLSG

SEQ ID NO: 446 - protein, 487 aa, synthetic construct
  source 1..487: note = FBXW7a-(GS)3-VL12.3 peptide
NQELLSVGSKRRRTGGSLRGNPSSSQVDEEQMNRVVEEEQQQQLRQQEEEHTARNGEVVGVEPRPGGQNDSQQGQLEENNNRFISVDEDSSGNQEEQEEDEEHAGEQDEEDEEEEEMDQESDDFDQSDDSSREDEHTHTNSVTNSSSIVDLPVHQLSSPFYTKTTKMKRKLDHGSEVRSFSLGKKPCKVSEYTSTTGLVPCSATPTTFGDLRAANGQGQQRRRITSVQPPTGLQEWLKMFQSWSGPEKLLALDELIDSCEPTQVKHMMQVIEPQFQRDFISLLPKELALYVLSFLEPKDLLQAAQTCRYWRILAEDNLLWREKCKEEGIDEPLHIKRRKVIKPGFIHSPWKSAYIRQHRIDTNSRRGGSGSGSGSQPVLTQSPSVSAAPRQRVTISVSGSNSNIGSNTVNWIQQLPGRAPELLMYDDDLLAPGVSDRFSGSRSGTSASLTISGLQSEDEADYYAATWDDSLNGWVFGGGTKVTVLSG

SEQ ID NO: 447 - protein, 489 aa, synthetic construct
  source 1..489: note = FBXW7a-(GS)4-VL12.3 peptide
NQELLSVGSKRRRTGGSLRGNPSSSQVDEEQMNRVVEEEQQQQLRQQEEEHTARNGEVVGVEPRPGGQNDSQQGQLEENNNRFISVDEDSSGNQEEQEEDEEHAGEQDEEDEEEEEMDQESDDFDQSDDSSREDEHTHTNSVTNSSSIVDLPVHQLSSPFYTKTTKMKRKLDHGSEVRSFSLGKKPCKVSEYTSTTGLVPCSATPTTFGDLRAANGQGQQRRRITSVQPPTGLQEWLKMFQSWSGPEKLLALDELIDSCEPTQVKHMMQVIEPQFQRDFISLLPKELALYVLSFLEPKDLLQAAQTCRYWRILAEDNLLWREKCKEEGIDEPLHIKRRKVIKPGFIHSPWKSAYIRQHRIDTNSRRGGSGSGSGSGSQPVLTQSPSVSAAPRQRVTISVSGSNSNIGSNTVNWIQQLPGRAPELLMYDDDLLAPGVSDRFSGSRSGTSASLTISGLQSEDEADYYAATWDDSLNGWVFGGGTKVTVLSG

SEQ ID NO: 448 - protein, 491 aa, synthetic construct
  source 1..491: note = FBXW7a-(GS)5-VL12.3 peptide
NQELLSVGSKRRRTGGSLRGNPSSSQVDEEQMNRVVEEEQQQQLRQQEEEHTARNGEVVGVEPRPGGQNDSQQGQLEENNNRFISVDEDSSGNQEEQEEDEEHAGEQDEEDEEEEEMDQESDDFDQSDDSSREDEHTHTNSVTNSSSIVDLPVHQLSSPFYTKTTKMKRKLDHGSEVRSFSLGKKPCKVSEYTSTTGLVPCSATPTTFGDLRAANGQGQQRRRITSVQPPTGLQEWLKMFQSWSGPEKLLALDELIDSCEPTQVKHMMQVIEPQFQRDFISLLPKELALYVLSFLEPKDLLQAAQTCRYWRILAEDNLLWREKCKEEGIDEPLHIKRRKVIKPGFIHSPWKSAYIRQHRIDTNSRRGGSGSGSGSGSGSQPVLTQSPSVSAAPRQRVTISVSGSNSNIGSNTVNWIQQLPGRAPELLMYDDDLLAPGVSDRFSGSRSGTSASLTISGLQSEDEADYYAATWDDSLNGWVFGGGTKVTVLSG

SEQ ID NO: 449 - protein, 493 aa, synthetic construct
  source 1..493: note = FBXW7a-(GS)6-VL12.3 peptide
NQELLSVGSKRRRTGGSLRGNPSSSQVDEEQMNRVVEEEQQQQLRQQEEEHTARNGEVVGVEPRPGGQNDSQQGQLEENNNRFISVDEDSSGNQEEQEEDEEHAGEQDEEDEEEEEMDQESDDFDQSDDSSREDEHTHTNSVTNSSSIVDLPVHQLSSPFYTKTTKMKRKLDHGSEVRSFSLGKKPCKVSEYTSTTGLVPCSATPTTFGDLRAANGQGQQRRRITSVQPPTGLQEWLKMFQSWSGPEKLLALDELIDSCEPTQVKHMMQVIEPQFQRDFISLLPKELALYVLSFLEPKDLLQAAQTCRYWRILAEDNLLWREKCKEEGIDEPLHIKRRKVIKPGFIHSPWKSAYIRQHRIDTNSRRGGSGSGSGSGSGSGSQPVLTQSPSVSAAPRQRVTISVSGSNSNIGSNTVNWIQQLPGRAPELLMYDDDLLAPGVSDRFSGSRSGTSASLTISGLQSEDEADYYAATWDDSLNGWVFGGGTKVTVLSG

SEQ ID NO: 450 - protein, 493 aa, synthetic construct
  source 1..493: note = HA-FBXW7a-(GS)1-VL12.3 peptide
MYPYDVPDYANQELLSVGSKRRRTGGSLRGNPSSSQVDEEQMNRVVEEEQQQQLRQQEEEHTARNGEVVGVEPRPGGQNDSQQGQLEENNNRFISVDEDSSGNQEEQEEDEEHAGEQDEEDEEEEEMDQESDDFDQSDDSSREDEHTHTNSVTNSSSIVDLPVHQLSSPFYTKTTKMKRKLDHGSEVRSFSLGKKPCKVSEYTSTTGLVPCSATPTTFGDLRAANGQGQQRRRITSVQPPTGLQEWLKMFQSWSGPEKLLALDELIDSCEPTQVKHMMQVIEPQFQRDFISLLPKELALYVLSFLEPKDLLQAAQTCRYWRILAEDNLLWREKCKEEGIDEPLHIKRRKVIKPGFIHSPWKSAYIRQHRIDTNSRRGGSGSQPVLTQSPSVSAAPRQRVTISVSGSNSNIGSNTVNWIQQLPGRAPELLMYDDDLLAPGVSDRFSGSRSGTSASLTISGLQSEDEADYYAATWDDSLNGWVFGGGTKVTVLSG

SEQ ID NO: 451 - protein, 495 aa, synthetic construct
  source 1..495: note = HA-FBXW7a-(GS)2-VL12.3 peptide
MYPYDVPDYANQELLSVGSKRRRTGGSLRGNPSSSQVDEEQMNRVVEEEQQQQLRQQEEEHTARNGEVVGVEPRPGGQNDSQQGQLEENNNRFISVDEDSSGNQEEQEEDEEHAGEQDEEDEEEEEMDQESDDFDQSDDSSREDEHTHTNSVTNSSSIVDLPVHQLSSPFYTKTTKMKRKLDHGSEVRSFSLGKKPCKVSEYTSTTGLVPCSATPTTFGDLRAANGQGQQRRRITSVQPPTGLQEWLKMFQSWSGPEKLLALDELIDSCEPTQVKHMMQVIEPQFQRDFISLLPKELALYVLSFLEPKDLLQAAQTCRYWRILAEDNLLWREKCKEEGIDEPLHIKRRKVIKPGFIHSPWKSAYIRQHRIDTNSRRGGSGSGSQPVLTQSPSVSAAPRQRVTISVSGSNSNIGSNTVNWIQQLPGRAPELLMYDDDLLAPGVSDRFSGSRSGTSASLTISGLQSEDEADYYAATWDDSLNGWVFGGGTKVTVLSG

SEQ ID NO: 452 - protein, 497 aa, synthetic construct
  source 1..497: note = HA-FBXW7a-(GS)3-VL12.3 peptide
MYPYDVPDYANQELLSVGSKRRRTGGSLRGNPSSSQVDEEQMNRVVEEEQQQQLRQQEEEHTARNGEVVGVEPRPGGQNDSQQGQLEENNNRFISVDEDSSGNQEEQEEDEEHAGEQDEEDEEEEEMDQESDDFDQSDDSSREDEHTHTNSVTNSSSIVDLPVHQLSSPFYTKTTKMKRKLDHGSEVRSFSLGKKPCKVSEYTSTTGLVPCSATPTTFGDLRAANGQGQQRRRITSVQPPTGLQEWLKMFQSWSGPEKLLALDELIDSCEPTQVKHMMQVIEPQFQRDFISLLPKELALYVLSFLEPKDLLQAAQTCRYWRILAEDNLLWREKCKEEGIDEPLHIKRRKVIKPGFIHSPWKSAYIRQHRIDTNSRRGGSGSGSGSQPVLTQSPSVSAAPRQRVTISVSGSNSNIGSNTVNWIQQLPGRAPELLMYDDDLLAPGVSDRFSGSRSGTSASLTISGLQSEDEADYYAATWDDSLNGWVFGGGTKVTVLSG

SEQ ID NO: 453 - protein, 499 aa, synthetic construct
  source 1..499: note = HA-FBXW7a-(GS)4-VL12.3 peptide
MYPYDVPDYANQELLSVGSKRRRTGGSLRGNPSSSQVDEEQMNRVVEEEQQQQLRQQEEEHTARNGEVVGVEPRPGGQNDSQQGQLEENNNRFISVDEDSSGNQEEQEEDEEHAGEQDEEDEEEEEMDQESDDFDQSDDSSREDEHTHTNSVTNSSSIVDLPVHQLSSPFYTKTTKMKRKLDHGSEVRSFSLGKKPCKVSEYTSTTGLVPCSATPTTFGDLRAANGQGQQRRRITSVQPPTGLQEWLKMFQSWSGPEKLLALDELIDSCEPTQVKHMMQVIEPQFQRDFISLLPKELALYVLSFLEPKDLLQAAQTCRYWRILAEDNLLWREKCKEEGIDEPLHIKRRKVIKPGFIHSPWKSAYIRQHRIDTNSRRGGSGSGSGSGSQPVLTQSPSVSAAPRQRVTISVSGSNSNIGSNTVNWIQQLPGRAPELLMYDDDLLAPGVSDRFSGSRSGTSASLTISGLQSEDEADYYAATWDDSLNGWVFGGGTKVTVLSG

SEQ ID NO: 454 - protein, 501 aa, synthetic construct
  source 1..501: note = HA-FBXW7a-(GS)5-VL12.3 peptide
MYPYDVPDYANQELLSVGSKRRRTGGSLRGNPSSSQVDEEQMNRVVEEEQQQQLRQQEEEHTARNGEVVGVEPRPGGQNDSQQGQLEENNNRFISVDEDSSGNQEEQEEDEEHAGEQDEEDEEEEEMDQESDDFDQSDDSSREDEHTHTNSVTNSSSIVDLPVHQLSSPFYTKTTKMKRKLDHGSEVRSFSLGKKPCKVSEYTSTTGLVPCSATPTTFGDLRAANGQGQQRRRITSVQPPTGLQEWLKMFQSWSGPEKLLALDELIDSCEPTQVKHMMQVIEPQFQRDFISLLPKELALYVLSFLEPKDLLQAAQTCRYWRILAEDNLLWREKCKEEGIDEPLHIKRRKVIKPGFIHSPWKSAYIRQHRIDTNSRRGGSGSGSGSGSGSQPVLTQSPSVSAAPRQRVTISVSGSNSNIGSNTVNWIQQLPGRAPELLMYDDDLLAPGVSDRFSGSRSGTSASLTISGLQSEDEADYYAATWDDSLNGWVFGGGTKVTVLSG

SEQ ID NO: 455 - protein, 503 aa, synthetic construct
  source 1..503: note = HA-FBXW7a-(GS)6-VL12.3 peptide
MYPYDVPDYANQELLSVGSKRRRTGGSLRGNPSSSQVDEEQMNRVVEEEQQQQLRQQEEEHTARNGEVVGVEPRPGGQNDSQQGQLEENNNRFISVDEDSSGNQEEQEEDEEHAGEQDEEDEEEEEMDQESDDFDQSDDSSREDEHTHTNSVTNSSSIVDLPVHQLSSPFYTKTTKMKRKLDHGSEVRSFSLGKKPCKVSEYTSTTGLVPCSATPTTFGDLRAANGQGQQRRRITSVQPPTGLQEWLKMFQSWSGPEKLLALDELIDSCEPTQVKHMMQVIEPQFQRDFISLLPKELALYVLSFLEPKDLLQAAQTCRYWRILAEDNLLWREKCKEEGIDEPLHIKRRKVIKPGFIHSPWKSAYIRQHRIDTNSRRGGSGSGSGSGSGSGSQPVLTQSPSVSAAPRQRVTISVSGSNSNIGSNTVNWIQQLPGRAPELLMYDDDLLAPGVSDRFSGSRSGTSASLTISGLQSEDEADYYAATWDDSLNGWVFGGGTKVTVLSG

SEQ ID NO: 456 - protein, 452 aa, synthetic construct
  source 1..452: note = NLS-Keap1-(GS)1-VL12.3 peptide
PAAKRVKLDGSGSGSQPDPRPSGAGACCRFLPLQSQCPEGAGDAVMYASTECKAEVTPSQHGNRTFSYTLEDHTKQAFGIMNELRLSQQLCDVTLQVKYQDAPAAQFMAHKVVLASSSPVFKAMFTNGLREQGMEVVSIEGIHPKVMERLIEFAYTASISMGEKCVLHVMNGAVMYQIDSVVRACSDFLVQQLDPSNAIGIANFAEQIGCVELHQRAREYIYMHFGEVAKQEEFFNLSHCQLVTLISRDDLNVRCESEVFHACINWVKYDCEQRRFYVQALLRAVRCHSLTPNFLQMQLQKCEILQSDSRCKDYLVKIFEELTLHKPTQVMPCRAPGSGSQPVLTQSPSVSAAPRQRVTISVSGSNSNIGSNTVNWIQQLPGRAPELLMYDDDLLAPGVSDRFSGSRSGTSASLTISGLQSEDEADYYAATWDDSLNGWVFGGGTKVTVLSG

SEQ ID NO: 457 - protein, 454 aa, synthetic construct
  source 1..454: note = NLS-Keap1-(GS)2-VL12.3 peptide
PAAKRVKLDGSGSGSQPDPRPSGAGACCRFLPLQSQCPEGAGDAVMYASTECKAEVTPSQHGNRTFSYTLEDHTKQAFGIMNELRLSQQLCDVTLQVKYQDAPAAQFMAHKVVLASSSPVFKAMFTNGLREQGMEVVSIEGIHPKVMERLIEFAYTASISMGEKCVLHVMNGAVMYQIDSVVRACSDFLVQQLDPSNAIGIANFAEQIGCVELHQRAREYIYMHFGEVAKQEEFFNLSHCQLVTLISRDDLNVRCESEVFHACINWVKYDCEQRRFYVQALLRAVRCHSLTPNFLQMQLQKCEILQSDSRCKDYLVKIFEELTLHKPTQVMPCRAPGSGSGSQPVLTQSPSVSAAPRQRVTISVSGSNSNIGSNTVNWIQQLPGRAPELLMYDDDLLAPGVSDRFSGSRSGTSASLTISGLQSEDEADYYAATWDDSLNGWVFGGGTKVTVLSG

SEQ ID NO: 458 - protein, 456 aa, synthetic construct
  source 1..456: note = NLS-Keap1-(GS)3-VL12.3 peptide
PAAKRVKLDGSGSGSQPDPRPSGAGACCRFLPLQSQCPEGAGDAVMYASTECKAEVTPSQHGNRTFSYTLEDHTKQAFGIMNELRLSQQLCDVTLQVKYQDAPAAQFMAHKVVLASSSPVFKAMFTNGLREQGMEVVSIEGIHPKVMERLIEFAYTASISMGEKCVLHVMNGAVMYQIDSVVRACSDFLVQQLDPSNAIGIANFAEQIGCVELHQRAREYIYMHFGEVAKQEEFFNLSHCQLVTLISRDDLNVRCESEVFHACINWVKYDCEQRRFYVQALLRAVRCHSLTPNFLQMQLQKCEILQSDSRCKDYLVKIFEELTLHKPTQVMPCRAPGSGSGSGSQPVLTQSPSVSAAPRQRVTISVSGSNSNIGSNTVNWIQQLPGRAPELLMYDDDLLAPGVSDRFSGSRSGTSASLTISGLQSEDEADYYAATWDDSLNGWVFGGGTKVTVLSG

SEQ ID NO: 459 - protein, 458 aa, synthetic construct
  source 1..458: note = NLS-Keap1-(GS)4-VL12.3 peptide
PAAKRVKLDGSGSGSQPDPRPSGAGACCRFLPLQSQCPEGAGDAVMYASTECKAEVTPSQHGNRTFSYTLEDHTKQAFGIMNELRLSQQLCDVTLQVKYQDAPAAQFMAHKVVLASSSPVFKAMFTNGLREQGMEVVSIEGIHPKVMERLIEFAYTASISMGEKCVLHVMNGAVMYQIDSVVRACSDFLVQQLDPSNAIGIANFAEQIGCVELHQRAREYIYMHFGEVAKQEEFFNLSHCQLVTLISRDDLNVRCESEVFHACINWVKYDCEQRRFYVQALLRAVRCHSLTPNFLQMQLQKCEILQSDSRCKDYLVKIFEELTLHKPTQVMPCRAPGSGSGSGSGSQPVLTQSPSVSAAPRQRVTISVSGSNSNIGSNTVNWIQQLPGRAPELLMYDDDLLAPGVSDRFSGSRSGTSASLTISGLQSEDEADYYAATWDDSLNGWVFGGGTKVTVLSG

SEQ ID NO: 460 - protein, 460 aa, synthetic construct
  source 1..460: note = NLS-Keap1-(GS)5-VL12.3 peptide
PAAKRVKLDGSGSGSQPDPRPSGAGACCRFLPLQSQCPEGAGDAVMYASTECKAEVTPSQHGNRTFSYTLEDHTKQAFGIMNELRLSQQLCDVTLQVKYQDAPAAQFMAHKVVLASSSPVFKAMFTNGLREQGMEVVSIEGIHPKVMERLIEFAYTASISMGEKCVLHVMNGAVMYQIDSVVRACSDFLVQQLDPSNAIGIANFAEQIGCVELHQRAREYIYMHFGEVAKQEEFFNLSHCQLVTLISRDDLNVRCESEVFHACINWVKYDCEQRRFYVQALLRAVRCHSLTPNFLQMQLQKCEILQSDSRCKDYLVKIFEELTLHKPTQVMPCRAPGSGSGSGSGSGSQPVLTQSPSVSAAPRQRVTISVSGSNSNIGSNTVNWIQQLPGRAPELLMYDDDLLAPGVSDRFSGSRSGTSASLTISGLQSEDEADYYAATWDDSLNGWVFGGGTKVTVLSG

SEQ ID NO: 461 - protein, 462 aa, synthetic construct
  source 1..462: note = NLS-Keap1-(GS)6-VL12.3 peptide
PAAKRVKLDGSGSGSQPDPRPSGAGACCRFLPLQSQCPEGAGDAVMYASTECKAEVTPSQHGNRTFSYTLEDHTKQAFGIMNELRLSQQLCDVTLQVKYQDAPAAQFMAHKVVLASSSPVFKAMFTNGLREQGMEVVSIEGIHPKVMERLIEFAYTASISMGEKCVLHVMNGAVMYQIDSVVRACSDFLVQQLDPSNAIGIANFAEQIGCVELHQRAREYIYMHFGEVAKQEEFFNLSHCQLVTLISRDDLNVRCESEVFHACINWVKYDCEQRRFYVQALLRAVRCHSLTPNFLQMQLQKCEILQSDSRCKDYLVKIFEELTLHKPTQVMPCRAPGSGSGSGSGSGSGSQPVLTQSPSVSAAPRQRVTISVSGSNSNIGSNTVNWIQQLPGRAPELLMYDDDLLAPGVSDRFSGSRSGTSASLTISGLQSEDEADYYAATWDDSLNGWVFGGGTKVTVLSG

SEQ ID NO: 462 - protein, 462 aa, synthetic construct
  source 1..462: note = HA-NLS-Keap1-(GS)1-VL12.3 peptide
MYPYDVPDYAPAAKRVKLDGSGSGSQPDPRPSGAGACCRFLPLQSQCPEGAGDAVMYASTECKAEVTPSQHGNRTFSYTLEDHTKQAFGIMNELRLSQQLCDVTLQVKYQDAPAAQFMAHKVVLASSSPVFKAMFTNGLREQGMEVVSIEGIHPKVMERLIEFAYTASISMGEKCVLHVMNGAVMYQIDSVVRACSDFLVQQLDPSNAIGIANFAEQIGCVELHQRAREYIYMHFGEVAKQEEFFNLSHCQLVTLISRDDLNVRCESEVFHACINWVKYDCEQRRFYVQALLRAVRCHSLTPNFLQMQLQKCEILQSDSRCKDYLVKIFEELTLHKPTQVMPCRAPGSGSQPVLTQSPSVSAAPRQRVTISVSGSNSNIGSNTVNWIQQLPGRAPELLMYDDDLLAPGVSDRFSGSRSGTSASLTISGLQSEDEADYYAATWDDSLNGWVFGGGTKVTVLSG

SEQ ID NO: 463 - protein, 464 aa, synthetic construct
  source 1..464: note = HA-NLS-Keap1-(GS)2-VL12.3 peptide
MYPYDVPDYAPAAKRVKLDGSGSGSQPDPRPSGAGACCRFLPLQSQCPEGAGDAVMYASTECKAEVTPSQHGNRTFSYTLEDHTKQAFGIMNELRLSQQLCDVTLQVKYQDAPAAQFMAHKVVLASSSPVFKAMFTNGLREQGMEVVSIEGIHPKVMERLIEFAYTASISMGEKCVLHVMNGAVMYQIDSVVRACSDFLVQQLDPSNAIGIANFAEQIGCVELHQRAREYIYMHFGEVAKQEEFFNLSHCQLVTLISRDDLNVRCESEVFHACINWVKYDCEQRRFYVQALLRAVRCHSLTPNFLQMQLQKCEILQSDSRCKDYLVKIFEELTLHKPTQVMPCRAPGSGSGSQPVLTQSPSVSAAPRQRVTISVSGSNSNIGSNTVNWIQQLPGRAPELLMYDDDLLAPGVSDRFSGSRSGTSASLTISGLQSEDEADYYAATWDDSLNGWVFGGGTKVTVLSG

SEQ ID NO: 464 - protein, 466 aa, synthetic construct
  source 1..466: note = HA-NLS-Keap1-(GS)3-VL12.3 peptide
MYPYDVPDYAPAAKRVKLDGSGSGSQPDPRPSGAGACCRFLPLQSQCPEGAGDAVMYASTECKAEVTPSQHGNRTFSYTLEDHTKQAFGIMNELRLSQQLCDVTLQVKYQDAPAAQFMAHKVVLASSSPVFKAMFTNGLREQGMEVVSIEGIHPKVMERLIEFAYTASISMGEKCVLHVMNGAVMYQIDSVVRACSDFLVQQLDPSNAIGIANFAEQIGCVELHQRAREYIYMHFGEVAKQEEFFNLSHCQLVTLISRDDLNVRCESEVFHACINWVKYDCEQRRFYVQALLRAVRCHSLTPNFLQMQLQKCEILQSDSRCKDYLVKIFEELTLHKPTQVMPCRAPGSGSGSGSQPVLTQSPSVSAAPRQRVTISVSGSNSNIGSNTVNWIQQLPGRAPELLMYDDDLLAPGVSDRFSGSRSGTSASLTISGLQSEDEADYYAATWDDSLNGWVFGGGTKVTVLSG

SEQ ID NO: 465 - protein, 468 aa, synthetic construct
  source 1..468: note = HA-NLS-Keap1-(GS)4-VL12.3 peptide
MYPYDVPDYAPAAKRVKLDGSGSGSQPDPRPSGAGACCRFLPLQSQCPEGAGDAVMYASTECKAEVTPSQHGNRTFSYTLEDHTKQAFGIMNELRLSQQLCDVTLQVKYQDAPAAQFMAHKVVLASSSPVFKAMFTNGLREQGMEVVSIEGIHPKVMERLIEFAYTASISMGEKCVLHVMNGAVMYQIDSVVRACSDFLVQQLDPSNAIGIANFAEQIGCVELHQRAREYIYMHFGEVAKQEEFFNLSHCQLVTLISRDDLNVRCESEVFHACINWVKYDCEQRRFYVQALLRAVRCHSLTPNFLQMQLQKCEILQSDSRCKDYLVKIFEELTLHKPTQVMPCRAPGSGSGSGSGSQPVLTQSPSVSAAPRQRVTISVSGSNSNIGSNTVNWIQQLPGRAPELLMYDDDLLAPGVSDRFSGSRSGTSASLTISGLQSEDEADYYAATWDDSLNGWVFGGGTKVTVLSG

SEQ ID NO: 466 - protein, 470 aa, synthetic construct
  source 1..470: note = HA-NLS-Keap1-(GS)5-VL12.3 peptide
MYPYDVPDYAPAAKRVKLDGSGSGSQPDPRPSGAGACCRFLPLQSQCPEGAGDAVMYASTECKAEVTPSQHGNRTFSYTLEDHTKQAFGIMNELRLSQQLCDVTLQVKYQDAPAAQFMAHKVVLASSSPVFKAMFTNGLREQGMEVVSIEGIHPKVMERLIEFAYTASISMGEKCVLHVMNGAVMYQIDSVVRACSDFLVQQLDPSNAIGIANFAEQIGCVELHQRAREYIYMHFGEVAKQEEFFNLSHCQLVTLISRDDLNVRCESEVFHACINWVKYDCEQRRFYVQALLRAVRCHSLTPNFLQMQLQKCEILQSDSRCKDYLVKIFEELTLHKPTQVMPCRAPGSGSGSGSGSGSQPVLTQSPSVSAAPRQRVTISVSGSNSNIGSNTVNWIQQLPGRAPELLMYDDDLLAPGVSDRFSGSRSGTSASLTISGLQSEDEADYYAATWDDSLNGWVFGGGTKVTVLSG

SEQ ID NO: 467 - protein, 472 aa, synthetic construct
  source 1..472: note = HA-NLS-Keap1-(GS)6-VL12.3 peptide
MYPYDVPDYAPAAKRVKLDGSGSGSQPDPRPSGAGACCRFLPLQSQCPEGAGDAVMYASTECKAEVTPSQHGNRTFSYTLEDHTKQAFGIMNELRLSQQLCDVTLQVKYQDAPAAQFMAHKVVLASSSPVFKAMFTNGLREQGMEVVSIEGIHPKVMERLIEFAYTASISMGEKCVLHVMNGAVMYQIDSVVRACSDFLVQQLDPSNAIGIANFAEQIGCVELHQRAREYIYMHFGEVAKQEEFFNLSHCQLVTLISRDDLNVRCESEVFHACINWVKYDCEQRRFYVQALLRAVRCHSLTPNFLQMQLQKCEILQSDSRCKDYLVKIFEELTLHKPTQVMPCRAPGSGSGSGSGSGSGSQPVLTQSPSVSAAPRQRVTISVSGSNSNIGSNTVNWIQQLPGRAPELLMYDDDLLAPGVSDRFSGSRSGTSASLTISGLQSEDEADYYAATWDDSLNGWVFGGGTKVTVLSG

SEQ ID NO: 468 - protein, 258 aa, synthetic construct
  source 1..258: note = NLS-RNF125-(GS)1-VL12.3 peptide
PAAKRVKLDGSGSGSGSVLSTDSGKSAPASATARALERRRDPELPVTSFDCAVCLEVLHQPVRTRCGHVFCRSCIATSLKNNKWTCPYCRAYLPSEGVPATDVAKRMKSEYKNCAECDTLVCLSEMRAHIRTCQKYIDKYGPGSGSQPVLTQSPSVSAAPRQRVTISVSGSNSNIGSNTVNWIQQLPGRAPELLMYDDDLLAPGVSDRFSGSRSGTSASLTISGLQSEDEADYYAATWDDSLNGWVFGGGTKVTVLSG

SEQ ID NO: 469 - protein, 260 aa, synthetic construct
  source 1..260: note = NLS-RNF125-(GS)2-VL12.3 peptide
PAAKRVKLDGSGSGSGSVLSTDSGKSAPASATARALERRRDPELPVTSFDCAVCLEVLHQPVRTRCGHVFCRSCIATSLKNNKWTCPYCRAYLPSEGVPATDVAKRMKSEYKNCAECDTLVCLSEMRAHIRTCQKYIDKYGPGSGSGSQPVLTQSPSVSAAPRQRVTISVSGSNSNIGSNTVNWIQQLPGRAPELLMYDDDLLAPGVSDRFSGSRSGTSASLTISGLQSEDEADYYAATWDDSLNGWVFGGGTKVTVLSG

SEQ ID NO: 470 - protein, 262 aa, synthetic construct
  source 1..262: note = NLS-RNF125-(GS)3-VL12.3 peptide
PAAKRVKLDGSGSGSGSVLSTDSGKSAPASATARALERRRDPELPVTSFDCAVCLEVLHQPVRTRCGHVFCRSCIATSLKNNKWTCPYCRAYLPSEGVPATDVAKRMKSEYKNCAECDTLVCLSEMRAHIRTCQKYIDKYGPGSGSGSGSQPVLTQSPSVSAAPRQRVTISVSGSNSNIGSNTVNWIQQLPGRAPELLMYDDDLLAPGVSDRFSGSRSGTSASLTISGLQSEDEADYYAATWDDSLNGWVFGGGTKVTVLSG

SEQ ID NO: 471 - protein, 264 aa, synthetic construct
  source 1..264: note = NLS-RNF125-(GS)4-VL12.3 peptide
PAAKRVKLDGSGSGSGSVLSTDSGKSAPASATARALERRRDPELPVTSFDCAVCLEVLHQPVRTRCGHVFCRSCIATSLKNNKWTCPYCRAYLPSEGVPATDVAKRMKSEYKNCAECDTLVCLSEMRAHIRTCQKYIDKYGPGSGSGSGSGSQPVLTQSPSVSAAPRQRVTISVSGSNSNIGSNTVNWIQQLPGRAPELLMYDDDLLAPGVSDRFSGSRSGTSASLTISGLQSEDEADYYAATWDDSLNGWVFGGGTKVTVLSG

SEQ ID NO: 472 - protein, 266 aa, synthetic construct
  source 1..266: note = NLS-RNF125-(GS)5-VL12.3 peptide
PAAKRVKLDGSGSGSGSVLSTDSGKSAPASATARALERRRDPELPVTSFDCAVCLEVLHQPVRTRCGHVFCRSCIATSLKNNKWTCPYCRAYLPSEGVPATDVAKRMKSEYKNCAECDTLVCLSEMRAHIRTCQKYIDKYGPGSGSGSGSGSGSQPVLTQSPSVSAAPRQRVTISVSGSNSNIGSNTVNWIQQLPGRAPELLMYDDDLLAPGVSDRFSGSRSGTSASLTISGLQSEDEADYYAATWDDSLNGWVFGGGTKVTVLSG

SEQ ID NO: 473 - protein, 268 aa, synthetic construct
  source 1..268: note = NLS-RNF125-(GS)6-VL12.3 peptide
PAAKRVKLDGSGSGSGSVLSTDSGKSAPASATARALERRRDPELPVTSFDCAVCLEVLHQPVRTRCGHVFCRSCIATSLKNNKWTCPYCRAYLPSEGVPATDVAKRMKSEYKNCAECDTLVCLSEMRAHIRTCQKYIDKYGPGSGSGSGSGSGSGSQPVLTQSPSVSAAPRQRVTISVSGSNSNIGSNTVNWIQQLPGRAPELLMYDDDLLAPGVSDRFSGSRSGTSASLTISGLQSEDEADYYAATWDDSLNGWVFGGGTKVTVLSG

SEQ ID NO: 474 - protein, 268 aa, synthetic construct
  source 1..268: note = HA-NLS-RNF125-(GS)1-VL12.3 peptide
MYPYDVPDYAPAAKRVKLDGSGSGSGSVLSTDSGKSAPASATARALERRRDPELPVTSFDCAVCLEVLHQPVRTRCGHVFCRSCIATSLKNNKWTCPYCRAYLPSEGVPATDVAKRMKSEYKNCAECDTLVCLSEMRAHIRTCQKYIDKYGPGSGSQPVLTQSPSVSAAPRQRVTISVSGSNSNIGSNTVNWIQQLPGRAPELLMYDDDLLAPGVSDRFSGSRSGTSASLTISGLQSEDEADYYAATWDDSLNGWVFGGGTKVTVLSG

SEQ ID NO: 475 - protein, 270 aa, synthetic construct
  source 1..270: note = HA-NLS-RNF125-(GS)2-VL12.3 peptide
MYPYDVPDYAPAAKRVKLDGSGSGSGSVLSTDSGKSAPASATARALERRRDPELPVTSFDCAVCLEVLHQPVRTRCGHVFCRSCIATSLKNNKWTCPYCRAYLPSEGVPATDVAKRMKSEYKNCAECDTLVCLSEMRAHIRTCQKYIDKYGPGSGSGSQPVLTQSPSVSAAPRQRVTISVSGSNSNIGSNTVNWIQQLPGRAPELLMYDDDLLAPGVSDRFSGSRSGTSASLTISGLQSEDEADYYAATWDDSLNGWVFGGGTKVTVLSG

SEQ ID NO: 476 - protein, 272 aa, synthetic construct
  source 1..272: note = HA-NLS-RNF125-(GS)3-VL12.3 peptide
MYPYDVPDYAPAAKRVKLDGSGSGSGSVLSTDSGKSAPASATARALERRRDPELPVTSFDCAVCLEVLHQPVRTRCGHVFCRSCIATSLKNNKWTCPYCRAYLPSEGVPATDVAKRMKSEYKNCAECDTLVCLSEMRAHIRTCQKYIDKYGPGSGSGSGSQPVLTQSPSVSAAPRQRVTISVSGSNSNIGSNTVNWIQQLPGRAPELLMYDDDLLAPGVSDRFSGSRSGTSASLTISGLQSEDEADYYAATWDDSLNGWVFGGGTKVTVLSG

SEQ ID NO: 477 - protein, 274 aa, synthetic construct
  source 1..274: note = HA-NLS-RNF125-(GS)4-VL12.3 peptide
MYPYDVPDYAPAAKRVKLDGSGSGSGSVLSTDSGKSAPASATARALERRRDPELPVTSFDCAVCLEVLHQPVRTRCGHVFCRSCIATSLKNNKWTCPYCRAYLPSEGVPATDVAKRMKSEYKNCAECDTLVCLSEMRAHIRTCQKYIDKYGPGSGSGSGSGSQPVLTQSPSVSAAPRQRVTISVSGSNSNIGSNTVNWIQQLPGRAPELLMYDDDLLAPGVSDRFSGSRSGTSASLTISGLQSEDEADYYAATWDDSLNGWVFGGGTKVTVLSG

SEQ ID NO: 478 - protein, 276 aa, synthetic construct
  source 1..276: note = HA-NLS-RNF125-(GS)5-VL12.3 peptide
MYPYDVPDYAPAAKRVKLDGSGSGSGSVLSTDSGKSAPASATARALERRRDPELPVTSFDCAVCLEVLHQPVRTRCGHVFCRSCIATSLKNNKWTCPYCRAYLPSEGVPATDVAKRMKSEYKNCAECDTLVCLSEMRAHIRTCQKYIDKYGPGSGSGSGSGSGSQPVLTQSPSVSAAPRQRVTISVSGSNSNIGSNTVNWIQQLPGRAPELLMYDDDLLAPGVSDRFSGSRSGTSASLTISGLQSEDEADYYAATWDDSLNGWVFGGGTKVTVLSG

SEQ ID NO: 479 - protein, 278 aa, synthetic construct
  source 1..278: note = HA-NLS-RNF125-(GS)6-VL12.3 peptide
MYPYDVPDYAPAAKRVKLDGSGSGSGSVLSTDSGKSAPASATARALERRRDPELPVTSFDCAVCLEVLHQPVRTRCGHVFCRSCIATSLKNNKWTCPYCRAYLPSEGVPATDVAKRMKSEYKNCAECDTLVCLSEMRAHIRTCQKYIDKYGPGSGSGSGSGSGSGSQPVLTQSPSVSAAPRQRVTISVSGSNSNIGSNTVNWIQQLPGRAPELLMYDDDLLAPGVSDRFSGSRSGTSASLTISGLQSEDEADYYAATWDDSLNGWVFGGGTKVTVLSG

SEQ ID NO: 480 - protein, 358 aa, synthetic construct
  source 1..358: note = VL12.3-(GS)1-SPOP-NLS peptide
MGSQPVLTQSPSVSAAPRQRVTISVSGSNSNIGSNTVNWIQQLPGRAPELLMYDDDLLAPGVSDRFSGSRSGTSASLTISGLQSEDEADYYAATWDDSLNGWVFGGGTKVTVLSGGSNGLLPDDKLTLFCEVSVVQDSVNISGQNTMNMVKVPECRLADELGGLWENSRFTDCCLCVAGQEFQAHKAILAARSPVFSAMFEHEMEESKKNRVEINDVEPEVFKEMMCFIYTGKAPNLDKMADDLLAAADKYALERLKVMCEDALCSNLSVENAAEILILADLHSADQLKTQAVDFINYHASDVLETSGWKSMVVSHPHLVAEAYRSLASAQCPFLGPPRKRLKQSGSGSPAAKRVKLD

SEQ ID NO: 481 - protein, 360 aa, synthetic construct
  source 1..360: note = VL12.3-(GS)2-SPOP-NLS peptide
MGSQPVLTQSPSVSAAPRQRVTISVSGSNSNIGSNTVNWIQQLPGRAPELLMYDDDLLAPGVSDRFSGSRSGTSASLTISGLQSEDEADYYAATWDDSLNGWVFGGGTKVTVLSGGSGSNGLLPDDKLTLFCEVSVVQDSVNISGQNTMNMVKVPECRLADELGGLWENSRFTDCCLCVAGQEFQAHKAILAARSPVFSAMFEHEMEESKKNRVEINDVEPEVFKEMMCFIYTGKAPNLDKMADDLLAAADKYALERLKVMCEDALCSNLSVENAAEILILADLHSADQLKTQAVDFINYHASDVLETSGWKSMVVSHPHLVAEAYRSLASAQCPFLGPPRKRLKQSGSGSPAAKRVKLD

SEQ ID NO: 482 - protein, 362 aa, synthetic construct
  source 1..362: note = VL12.3-(GS)3-SPOP-NLS peptide
MGSQPVLTQSPSVSAAPRQRVTISVSGSNSNIGSNTVNWIQQLPGRAPELLMYDDDLLAPGVSDRFSGSRSGTSASLTISGLQSEDEADYYAATWDDSLNGWVFGGGTKVTVLSGGSGSGSNGLLPDDKLTLFCEVSVVQDSVNISGQNTMNMVKVPECRLADELGGLWENSRFTDCCLCVAGQEFQAHKAILAARSPVFSAMFEHEMEESKKNRVEINDVEPEVFKEMMCFIYTGKAPNLDKMADDLLAAADKYALERLKVMCEDALCSNLSVENAAEILILADLHSADQLKTQAVDFINYHASDVLETSGWKSMVVSHPHLVAEAYRSLASAQCPFLGPPRKRLKQSGSGSPAAKRVKLD

SEQ ID NO: 483 - protein, 364 aa, synthetic construct
  source 1..364: note = VL12.3-(GS)4-SPOP-NLS peptide
MGSQPVLTQSPSVSAAPRQRVTISVSGSNSNIGSNTVNWIQQLPGRAPELLMYDDDLLAPGVSDRFSGSRSGTSASLTISGLQSEDEADYYAATWDDSLNGWVFGGGTKVTVLSGGSGSGSGSNGLLPDDKLTLFCEVSVVQDSVNISGQNTMNMVKVPECRLADELGGLWENSRFTDCCLCVAGQEFQAHKAILAARSPVFSAMFEHEMEESKKNRVEINDVEPEVFKEMMCFIYTGKAPNLDKMADDLLAAADKYALERLKVMCEDALCSNLSVENAAEILILADLHSADQLKTQAVDFINYHASDVLETSGWKSMVVSHPHLVAEAYRSLASAQCPFLGPPRKRLKQSGSGSPAAKRVKLD

SEQ ID NO: 484 - protein, 367 aa, synthetic construct
  source 1..367: note = VL12.3-(GS)5-SPOP-NLS peptide
MGSQPVLTQSPSVSAAPRQRVTISVSGSNSNIGSNTVNWIQQLPGRAPELLMYDDDLLAPGVSDRFSGSRSGTSASLTISGLQSEDEADYYAATWDDSLNGWVFGGGTKVTVLSGGSGSGSGSGSNGLLPDDKLTLFCEVSVVQDSVNISGQNTMNMVKVPECRLADELGGLWENSRFTDCCLCVAGQEFQAHKAILAARSPVFSAMFEHEMEESKKNRVEINDVEPEVFKEMMCFIYTGKAPNLDKMADDLLAAADKYALERLKVMCEDALCSNLSVENAAEILILADLHSADQLKTQAVDFINYHASDVLETSGWKSMVVSHPHLVAEAYRSLASAQCPFLGPPRKRLKQSGSGSPAAKRVKLDA

SEQ ID NO: 485 - protein, 368 aa, synthetic construct
  source 1..368: note = VL12.3-(GS)6-SPOP-NLS peptide
MGSQPVLTQSPSVSAAPRQRVTISVSGSNSNIGSNTVNWIQQLPGRAPELLMYDDDLLAPGVSDRFSGSRSGTSASLTISGLQSEDEADYYAATWDDSLNGWVFGGGTKVTVLSGGSGSGSGSGSGSNGLLPDDKLTLFCEVSVVQDSVNISGQNTMNMVKVPECRLADELGGLWENSRFTDCCLCVAGQEFQAHKAILAARSPVFSAMFEHEMEESKKNRVEINDVEPEVFKEMMCFIYTGKAPNLDKMADDLLAAADKYALERLKVMCEDALCSNLSVENAAEILILADLHSADQLKTQAVDFINYHASDVLETSGWKSMVVSHPHLVAEAYRSLASAQCPFLGPPRKRLKQSGSGSPAAKRVKLD

SEQ ID NO: 486 - protein, 367 aa, synthetic construct
  source 1..367: note = VL12.3-(GS)1-SPOP-NLS-HA peptide
MGSQPVLTQSPSVSAAPRQRVTISVSGSNSNIGSNTVNWIQQLPGRAPELLMYDDDLLAPGVSDRFSGSRSGTSASLTISGLQSEDEADYYAATWDDSLNGWVFGGGTKVTVLSGGSNGLLPDDKLTLFCEVSVVQDSVNISGQNTMNMVKVPECRLADELGGLWENSRFTDCCLCVAGQEFQAHKAILAARSPVFSAMFEHEMEESKKNRVEINDVEPEVFKEMMCFIYTGKAPNLDKMADDLLAAADKYALERLKVMCEDALCSNLSVENAAEILILADLHSADQLKTQAVDFINYHASDVLETSGWKSMVVSHPHLVAEAYRSLASAQCPFLGPPRKRLKQSGSGSPAAKRVKLDYPYDVPDYA

SEQ ID NO: 487 - protein, 369 aa, synthetic construct
  source 1..369: note = VL12.3-(GS)2-SPOP-NLS-HA peptide
MGSQPVLTQSPSVSAAPRQRVTISVSGSNSNIGSNTVNWIQQLPGRAPELLMYDDDLLAPGVSDRFSGSRSGTSASLTISGLQSEDEADYYAATWDDSLNGWVFGGGTKVTVLSGGSGSNGLLPDDKLTLFCEVSVVQDSVNISGQNTMNMVKVPECRLADELGGLWENSRFTDCCLCVAGQEFQAHKAILAARSPVFSAMFEHEMEESKKNRVEINDVEPEVFKEMMCFIYTGKAPNLDKMADDLLAAADKYALERLKVMCEDALCSNLSVENAAEILILADLHSADQLKTQAVDFINYHASDVLETSGWKSMVVSHPHLVAEAYRSLASAQCPFLGPPRKRLKQSGSGSPAAKRVKLDYPYDVPDYA

SEQ ID NO: 488 - protein, 371 aa, synthetic construct
  source 1..371: note = VL12.3-(GS)3-SPOP-NLS-HA peptide
MGSQPVLTQSPSVSAAPRQRVTISVSGSNSNIGSNTVNWIQQLPGRAPELLMYDDDLLAPGVSDRFSGSRSGTSASLTISGLQSEDEADYYAATWDDSLNGWVFGGGTKVTVLSGGSGSGSNGLLPDDKLTLFCEVSVVQDSVNISGQNTMNMVKVPECRLADELGGLWENSRFTDCCLCVAGQEFQAHKAILAARSPVFSAMFEHEMEESKKNRVEINDVEPEVFKEMMCFIYTGKAPNLDKMADDLLAAADKYALERLKVMCEDALCSNLSVENAAEILILADLHSADQLKTQAVDFINYHASDVLETSGWKSMVVSHPHLVAEAYRSLASAQCPFLGPPRKRLKQSGSGSPAAKRVKLDYPYDVPDYA

SEQ ID NO: 489 - protein, 373 aa, synthetic construct
  source 1..373: note = VL12.3-(GS)4-SPOP-NLS-HA peptide
MGSQPVLTQSPSVSAAPRQRVTISVSGSNSNIGSNTVNWIQQLPGRAPELLMYDDDLLAPGVSDRFSGSRSGTSASLTISGLQSEDEADYYAATWDDSLNGWVFGGGTKVTVLSGGSGSGSGSNGLLPDDKLTLFCEVSVVQDSVNISGQNTMNMVKVPECRLADELGGLWENSRFTDCCLCVAGQEFQAHKAILAARSPVFSAMFEHEMEESKKNRVEINDVEPEVFKEMMCFIYTGKAPNLDKMADDLLAAADKYALERLKVMCEDALCSNLSVENAAEILILADLHSADQLKTQAVDFINYHASDVLETSGWKSMVVSHPHLVAEAYRSLASAQCPFLGPPRKRLKQSGSGSPAAKRVKLDYPYDVPDYA

SEQ ID NO: 490 - protein, 376 aa, synthetic construct
  source 1..376: note = VL12.3-(GS)5-SPOP-NLS-HA peptide
MGSQPVLTQSPSVSAAPRQRVTISVSGSNSNIGSNTVNWIQQLPGRAPELLMYDDDLLAPGVSDRFSGSRSGTSASLTISGLQSEDEADYYAATWDDSLNGWVFGGGTKVTVLSGGSGSGSGSGSNGLLPDDKLTLFCEVSVVQDSVNISGQNTMNMVKVPECRLADELGGLWENSRFTDCCLCVAGQEFQAHKAILAARSPVFSAMFEHEMEESKKNRVEINDVEPEVFKEMMCFIYTGKAPNLDKMADDLLAAADKYALERLKVMCEDALCSNLSVENAAEILILADLHSADQLKTQAVDFINYHASDVLETSGWKSMVVSHPHLVAEAYRSLASAQCPFLGPPRKRLKQSGSGSPAAKRVKLDYPYDVPDYAA

SEQ ID NO: 491 - protein, 377 aa, synthetic construct
  source 1..377: note = VL12.3-(GS)6-SPOP-NLS-HA peptide
MGSQPVLTQSPSVSAAPRQRVTISVSGSNSNIGSNTVNWIQQLPGRAPELLMYDDDLLAPGVSDRFSGSRSGTSASLTISGLQSEDEADYYAATWDDSLNGWVFGGGTKVTVLSGGSGSGSGSGSGSNGLLPDDKLTLFCEVSVVQDSVNISGQNTMNMVKVPECRLADELGGLWENSRFTDCCLCVAGQEFQAHKAILAARSPVFSAMFEHEMEESKKNRVEINDVEPEVFKEMMCFIYTGKAPNLDKMADDLLAAADKYALERLKVMCEDALCSNLSVENAAEILILADLHSADQLKTQAVDFINYHASDVLETSGWKSMVVSHPHLVAEAYRSLASAQCPFLGPPRKRLKQSGSGSPAAKRVKLDYPYDVPDYA

SEQ ID NO: 492 - protein, 297 aa, synthetic construct
  source 1..297: note = VL12.3-(GS)1-CHIP peptide
MGSQPVLTQSPSVSAAPRQRVTISVSGSNSNIGSNTVNWIQQLPGRAPELLMYDDDLLAPGVSDRFSGSRSGTSASLTISGLQSEDEADYYAATWDDSLNGWVFGGGTKVTVLSGGSRLNFGDDIPSALRIAKKKRWNSIEERRIHQESELHSYLSRLIAAERERELEECQRNHEGDEDDSHVRAQQACIEAKHDKYMADMDELFSQVDEKRKKRDIPDYLCGKISFELMREPCITPSGITYDRKDIEEHLQRVGHFDPVTRSPLTQEQLIPNLAMKEVIDAFISENGWVEDYGSGS

SEQ ID NO: 493 - protein, 299 aa, synthetic construct
  source 1..299: note = VL12.3-(GS)2-CHIP peptide
MGSQPVLTQSPSVSAAPRQRVTISVSGSNSNIGSNTVNWIQQLPGRAPELLMYDDDLLAPGVSDRFSGSRSGTSASLTISGLQSEDEADYYAATWDDSLNGWVFGGGTKVTVLSGGSGSRLNFGDDIPSALRIAKKKRWNSIEERRIHQESELHSYLSRLIAAERERELEECQRNHEGDEDDSHVRAQQACIEAKHDKYMADMDELFSQVDEKRKKRDIPDYLCGKISFELMREPCITPSGITYDRKDIEEHLQRVGHFDPVTRSPLTQEQLIPNLAMKEVIDAFISENGWVEDYGSGS

SEQ ID NO: 494 - protein, 301 aa, synthetic construct
  source 1..301: note = VL12.3-(GS)3-CHIP peptide
MGSQPVLTQSPSVSAAPRQRVTISVSGSNSNIGSNTVNWIQQLPGRAPELLMYDDDLLAPGVSDRFSGSRSGTSASLTISGLQSEDEADYYAATWDDSLNGWVFGGGTKVTVLSGGSGSGSRLNFGDDIPSALRIAKKKRWNSIEERRIHQESELHSYLSRLIAAERERELEECQRNHEGDEDDSHVRAQQACIEAKHDKYMADMDELFSQVDEKRKKRDIPDYLCGKISFELMREPCITPSGITYDRKDIEEHLQRVGHFDPVTRSPLTQEQLIPNLAMKEVIDAFISENGWVEDYGSGS

SEQ ID NO: 495 - protein, 303 aa, synthetic construct
  source 1..303: note = VL12.3-(GS)4-CHIP peptide
MGSQPVLTQSPSVSAAPRQRVTISVSGSNSNIGSNTVNWIQQLPGRAPELLMYDDDLLAPGVSDRFSGSRSGTSASLTISGLQSEDEADYYAATWDDSLNGWVFGGGTKVTVLSGGSGSGSGSRLNFGDDIPSALRIAKKKRWNSIEERRIHQESELHSYLSRLIAAERERELEECQRNHEGDEDDSHVRAQQACIEAKHDKYMADMDELFSQVDEKRKKRDIPDYLCGKISFELMREPCITPSGITYDRKDIEEHLQRVGHFDPVTRSPLTQEQLIPNLAMKEVIDAFISENGWVEDYGSGS

SEQ ID NO: 496 - protein, 305 aa, synthetic construct
  source 1..305: note = VL12.3-(GS)5-CHIP peptide
MGSQPVLTQSPSVSAAPRQRVTISVSGSNSNIGSNTVNWIQQLPGRAPELLMYDDDLLAPGVSDRFSGSRSGTSASLTISGLQSEDEADYYAATWDDSLNGWVFGGGTKVTVLSGGSGSGSGSGSRLNFGDDIPSALRIAKKKRWNSIEERRIHQESELHSYLSRLIAAERERELEECQRNHEGDEDDSHVRAQQACIEAKHDKYMADMDELFSQVDEKRKKRDIPDYLCGKISFELMREPCITPSGITYDRKDIEEHLQRVGHFDPVTRSPLTQEQLIPNLAMKEVIDAFISENGWVEDYGSGS

SEQ ID NO: 497 - protein, 307 aa, synthetic construct
  source 1..307: note = VL12.3-(GS)6-CHIP peptide
MGSQPVLTQSPSVSAAPRQRVTISVSGSNSNIGSNTVNWIQQLPGRAPELLMYDDDLLAPGVSDRFSGSRSGTSASLTISGLQSEDEADYYAATWDDSLNGWVFGGGTKVTVLSGGSGSGSGSGSGSRLNFGDDIPSALRIAKKKRWNSIEERRIHQESELHSYLSRLIAAERERELEECQRNHEGDEDDSHVRAQQACIEAKHDKYMADMDELFSQVDEKRKKRDIPDYLCGKISFELMREPCITPSGITYDRKDIEEHLQRVGHFDPVTRSPLTQEQLIPNLAMKEVIDAFISENGWVEDYGSGS

SEQ ID NO: 498 - protein, 306 aa, synthetic construct
  source 1..306: note = VL12.3-(GS)1-CHIP-HA peptide
MGSQPVLTQSPSVSAAPRQRVTISVSGSNSNIGSNTVNWIQQLPGRAPELLMYDDDLLAPGVSDRFSGSRSGTSASLTISGLQSEDEADYYAATWDDSLNGWVFGGGTKVTVLSGGSRLNFGDDIPSALRIAKKKRWNSIEERRIHQESELHSYLSRLIAAERERELEECQRNHEGDEDDSHVRAQQACIEAKHDKYMADMDELFSQVDEKRKKRDIPDYLCGKISFELMREPCITPSGITYDRKDIEEHLQRVGHFDPVTRSPLTQEQLIPNLAMKEVIDAFISENGWVEDYGSGSYPYDVPDYA

SEQ ID NO: 499 - protein, 308 aa, synthetic construct
  source 1..308: note = VL12.3-(GS)2-CHIP-HA peptide
MGSQPVLTQSPSVSAAPRQRVTISVSGSNSNIGSNTVNWIQQLPGRAPELLMYDDDLLAPGVSDRFSGSRSGTSASLTISGLQSEDEADYYAATWDDSLNGWVFGGGTKVTVLSGGSGSRLNFGDDIPSALRIAKKKRWNSIEERRIHQESELHSYLSRLIAAERERELEECQRNHEGDEDDSHVRAQQACIEAKHDKYMADMDELFSQVDEKRKKRDIPDYLCGKISFELMREPCITPSGITYDRKDIEEHLQRVGHFDPVTRSPLTQEQLIPNLAMKEVIDAFISENGWVEDYGSGSYPYDVPDYA

SEQ ID NO: 500 - protein, 310 aa, synthetic construct
  source 1..310: note = VL12.3-(GS)3-CHIP-HA peptide
MGSQPVLTQSPSVSAAPRQRVTISVSGSNSNIGSNTVNWIQQLPGRAPELLMYDDDLLAPGVSDRFSGSRSGTSASLTISGLQSEDEADYYAATWDDSLNGWVFGGGTKVTVLSGGSGSGSRLNFGDDIPSALRIAKKKRWNSIEERRIHQESELHSYLSRLIAAERERELEECQRNHEGDEDDSHVRAQQACIEAKHDKYMADMDELFSQVDEKRKKRDIPDYLCGKISFELMREPCITPSGITYDRKDIEEHLQRVGHFDPVTRSPLTQEQLIPNLAMKEVIDAFISENGWVEDYGSGSYPYDVPDYA

SEQ ID NO: 501 - protein, 312 aa, synthetic construct
  source 1..312: note = VL12.3-(GS)4-CHIP-HA peptide
MGSQPVLTQSPSVSAAPRQRVTISVSGSNSNIGSNTVNWIQQLPGRAPELLMYDDDLLAPGVSDRFSGSRSGTSASLTISGLQSEDEADYYAATWDDSLNGWVFGGGTKVTVLSGGSGSGSGSRLNFGDDIPSALRIAKKKRWNSIEERRIHQESELHSYLSRLIAAERERELEECQRNHEGDEDDSHVRAQQACIEAKHDKYMADMDELFSQVDEKRKKRDIPDYLCGKISFELMREPCITPSGITYDRKDIEEHLQRVGHFDPVTRSPLTQEQLIPNLAMKEVIDAFISENGWVEDYGSGSYPYDVPDYA

SEQ ID NO: 502 - protein, 314 aa, synthetic construct
  source 1..314: note = VL12.3-(GS)5-CHIP-HA peptide
MGSQPVLTQSPSVSAAPRQRVTISVSGSNSNIGSNTVNWIQQLPGRAPELLMYDDDLLAPGVSDRFSGSRSGTSASLTISGLQSEDEADYYAATWDDSLNGWVFGGGTKVTVLSGGSGSGSGSGSRLNFGDDIPSALRIAKKKRWNSIEERRIHQESELHSYLSRLIAAERERELEECQRNHEGDEDDSHVRAQQACIEAKHDKYMADMDELFSQVDEKRKKRDIPDYLCGKISFELMREPCITPSGITYDRKDIEEHLQRVGHFDPVTRSPLTQEQLIPNLAMKEVIDAFISENGWVEDYGSGSYPYDVPDYA

SEQ ID NO: 503 - protein, 316 aa, synthetic construct
  source 1..316: note = VL12.3-(GS)6-CHIP-HA peptide
MGSQPVLTQSPSVSAAPRQRVTISVSGSNSNIGSNTVNWIQQLPGRAPELLMYDDDLLAPGVSDRFSGSRSGTSASLTISGLQSEDEADYYAATWDDSLNGWVFGGGTKVTVLSGGSGSGSGSGSGSRLNFGDDIPSALRIAKKKRWNSIEERRIHQESELHSYLSRLIAAERERELEECQRNHEGDEDDSHVRAQQACIEAKHDKYMADMDELFSQVDEKRKKRDIPDYLCGKISFELMREPCITPSGITYDRKDIEEHLQRVGHFDPVTRSPLTQEQLIPNLAMKEVIDAFISENGWVEDYGSGSYPYDVPDYA

SEQ ID NO: 504 - protein, 151 aa, synthetic construct
  source 1..151: note = DCAF1-(GS)1-VL12.3 peptide
QAPINFTSRLNRRASFPKYGGVDGGCFDRHLIFSRGSGSQPVLTQSPSVSAAPRQRVTISVSGSNSNIGSNTVNWIQQLPGRAPELLMYDDDLLAPGVSDRFSGSRSGTSASLTISGLQSEDEADYYAATWDDSLNGWVFGGGTKVTVLSG

SEQ ID NO: 505 - protein, 153 aa, synthetic construct
  source 1..153: note = DCAF1-(GS)2-VL12.3 peptide
QAPINFTSRLNRRASFPKYGGVDGGCFDRHLIFSRGSGSGSQPVLTQSPSVSAAPRQRVTISVSGSNSNIGSNTVNWIQQLPGRAPELLMYDDDLLAPGVSDRFSGSRSGTSASLTISGLQSEDEADYYAATWDDSLNGWVFGGGTKVTVLSG

SEQ ID NO: 506 - protein, 155 aa, synthetic construct
  source 1..155: note = DCAF1-(GS)3-VL12.3 peptide
QAPINFTSRLNRRASFPKYGGVDGGCFDRHLIFSRGSGSGSGSQPVLTQSPSVSAAPRQRVTISVSGSNSNIGSNTVNWIQQLPGRAPELLMYDDDLLAPGVSDRFSGSRSGTSASLTISGLQSEDEADYYAATWDDSLNGWVFGGGTKVTVLSG

SEQ ID NO: 507 - protein, 157 aa, synthetic construct
  source 1..157: note = DCAF1-(GS)4-VL12.3 peptide
QAPINFTSRLNRRASFPKYGGVDGGCFDRHLIFSRGSGSGSGSGSQPVLTQSPSVSAAPRQRVTISVSGSNSNIGSNTVNWIQQLPGRAPELLMYDDDLLAPGVSDRFSGSRSGTSASLTISGLQSEDEADYYAATWDDSLNGWVFGGGTKVTVLSG

SEQ ID NO: 508 - protein, 159 aa, synthetic construct
  source 1..159: note = DCAF1-(GS)5-VL12.3 peptide
QAPINFTSRLNRRASFPKYGGVDGGCFDRHLIFSRGSGSGSGSGSGSQPVLTQSPSVSAAPRQRVTISVSGSNSNIGSNTVNWIQQLPGRAPELLMYDDDLLAPGVSDRFSGSRSGTSASLTISGLQSEDEADYYAATWDDSLNGWVFGGGTKVTVLSG

SEQ ID NO: 509 - protein, 161 aa, synthetic construct
  source 1..161: note = DCAF1-(GS)6-VL12.3 peptide
QAPINFTSRLNRRASFPKYGGVDGGCFDRHLIFSRGSGSGSGSGSGSGSQPVLTQSPSVSAAPRQRVTISVSGSNSNIGSNTVNWIQQLPGRAPELLMYDDDLLAPGVSDRFSGSRSGTSASLTISGLQSEDEADYYAATWDDSLNGWVFGGGTKVTVLSG

SEQ ID NO: 510 - protein, 167 aa, synthetic construct
  source 1..167: note = HA-DCAF1-(GS)1-VL12.3 peptide
MYPYDVPDYAGSGSGSQAPINFTSRLNRRASFPKYGGVDGGCFDRHLIFSRGSGSQPVLTQSPSVSAAPRQRVTISVSGSNSNIGSNTVNWIQQLPGRAPELLMYDDDLLAPGVSDRFSGSRSGTSASLTISGLQSEDEADYYAATWDDSLNGWVFGGGTKVTVLSG

SEQ ID NO: 511 - protein, 169 aa, synthetic construct
  source 1..169: note = HA-DCAF1-(GS)2-VL12.3 peptide
MYPYDVPDYAGSGSGSQAPINFTSRLNRRASFPKYGGVDGGCFDRHLIFSRGSGSGSQPVLTQSPSVSAAPRQRVTISVSGSNSNIGSNTVNWIQQLPGRAPELLMYDDDLLAPGVSDRFSGSRSGTSASLTISGLQSEDEADYYAATWDDSLNGWVFGGGTKVTVLSG

SEQ ID NO: 512 - protein, 171 aa, synthetic construct
  source 1..171: note = HA-DCAF1-(GS)3-VL12.3 peptide
MYPYDVPDYAGSGSGSQAPINFTSRLNRRASFPKYGGVDGGCFDRHLIFSRGSGSGSGSQPVLTQSPSVSAAPRQRVTISVSGSNSNIGSNTVNWIQQLPGRAPELLMYDDDLLAPGVSDRFSGSRSGTSASLTISGLQSEDEADYYAATWDDSLNGWVFGGGTKVTVLSG

SEQ ID NO: 513 - protein, 173 aa, synthetic construct
  source 1..173: note = HA-DCAF1-(GS)4-VL12.3 peptide
MYPYDVPDYAGSGSGSQAPINFTSRLNRRASFPKYGGVDGGCFDRHLIFSRGSGSGSGSGSQPVLTQSPSVSAAPRQRVTISVSGSNSNIGSNTVNWIQQLPGRAPELLMYDDDLLAPGVSDRFSGSRSGTSASLTISGLQSEDEADYYAATWDDSLNGWVFGGGTKVTVLSG

SEQ ID NO: 514 - protein, 175 aa, synthetic construct
  source 1..175: note = HA-DCAF1-(GS)5-VL12.3 peptide
MYPYDVPDYAGSGSGSQAPINFTSRLNRRASFPKYGGVDGGCFDRHLIFSRGSGSGSGSGSGSQPVLTQSPSVSAAPRQRVTISVSGSNSNIGSNTVNWIQQLPGRAPELLMYDDDLLAPGVSDRFSGSRSGTSASLTISGLQSEDEADYYAATWDDSLNGWVFGGGTKVTVLSG

SEQ ID NO: 515 - protein, 177 aa, synthetic construct
  source 1..177: note = HA-DCAF1-(GS)6-VL12.3 peptide
MYPYDVPDYAGSGSGSQAPINFTSRLNRRASFPKYGGVDGGCFDRHLIFSRGSGSGSGSGSGSGSQPVLTQSPSVSAAPRQRVTISVSGSNSNIGSNTVNWIQQLPGRAPELLMYDDDLLAPGVSDRFSGSRSGTSASLTISGLQSEDEADYYAATWDDSLNGWVFGGGTKVTVLSG

SEQ ID NO: 516 - protein, 472 aa, synthetic construct
  source 1..472: note = VL12.3-(GS)1-E6AP peptide
GSQPVLTQSPSVSAAPRQRVTISVSGSNSNIGSNTVNWIQQLPGRAPELLMYDDDLLAPGVSDRFSGSRSGTSASLTISGLQSEDEADYYAATWDDSLNGWVFGGGTKVTVLSGGSNPYLRLKVRRDHIIDDALVRLEMIAMENPADLKKQLYVEFEGEQGVDEGGVSKEFFQLVVEEIFNPDIGMFTYDESTKLFWFNPSSFETEGQFTLIGIVLGLAIYNNCILDVHFPMVVYRKLMGKKGTFRDLGDSHPVLYQSLKDLLEYEGNVEDDMMITFQISQTDLFGNPMMYDLKENGDKIPITNENRKEFVNLYSDYILNKSVEKQFKAFRRGFHMVTNESPLKYLFRPEEIELLICGSRNLDFQALEETTEYDGGYTRDSVLIREFWEIVHSFTDEQKRLFLQFTTGTDRAPVGGLGKLKMIIAKNGPDTERLPTSHTCFNVLLLPEYSSKEKLKERLLKAITYAKGFGML

SEQ ID NO: 517 - protein, 474 aa, synthetic construct
  source 1..474: note = VL12.3-(GS)2-E6AP peptide
GSQPVLTQSPSVSAAPRQRVTISVSGSNSNIGSNTVNWIQQLPGRAPELLMYDDDLLAPGVSDRFSGSRSGTSASLTISGLQSEDEADYYAATWDDSLNGWVFGGGTKVTVLSGGSGSNPYLRLKVRRDHIIDDALVRLEMIAMENPADLKKQLYVEFEGEQGVDEGGVSKEFFQLVVEEIFNPDIGMFTYDESTKLFWFNPSSFETEGQFTLIGIVLGLAIYNNCILDVHFPMVVYRKLMGKKGTFRDLGDSHPVLYQSLKDLLEYEGNVEDDMMITFQISQTDLFGNPMMYDLKENGDKIPITNENRKEFVNLYSDYILNKSVEKQFKAFRRGFHMVTNESPLKYLFRPEEIELLICGSRNLDFQALEETTEYDGGYTRDSVLIREFWEIVHSFTDEQKRLFLQFTTGTDRAPVGGLGKLKMIIAKNGPDTERLPTSHTCFNVLLLPEYSSKEKLKERLLKAITYAKGFGML

SEQ ID NO: 518 - protein, 476 aa, synthetic construct
  source 1..476: note = VL12.3-(GS)3-E6AP peptide
GSQPVLTQSPSVSAAPRQRVTISVSGSNSNIGSNTVNWIQQLPGRAPELLMYDDDLLAPGVSDRFSGSRSGTSASLTISGLQSEDEADYYAATWDDSLNGWVFGGGTKVTVLSGGSGSGSNPYLRLKVRRDHIIDDALVRLEMIAMENPADLKKQLYVEFEGEQGVDEGGVSKEFFQLVVEEIFNPDIGMFTYDESTKLFWFNPSSFETEGQFTLIGIVLGLAIYNNCILDVHFPMVVYRKLMGKKGTFRDLGDSHPVLYQSLKDLLEYEGNVEDDMMITFQISQTDLFGNPMMYDLKENGDKIPITNENRKEFVNLYSDYILNKSVEKQFKAFRRGFHMVTNESPLKYLFRPEEIELLICGSRNLDFQALEETTEYDGGYTRDSVLIREFWEIVHSFTDEQKRLFLQFTTGTDRAPVGGLGKLKMIIAKNGPDTERLPTSHTCFNVLLLPEYSSKEKLKERLLKAITYAKGFGML

SEQ ID NO: 519 - protein, 478 aa, synthetic construct
  source 1..478: note = VL12.3-(GS)4-E6AP peptide
GSQPVLTQSPSVSAAPRQRVTISVSGSNSNIGSNTVNWIQQLPGRAPELLMYDDDLLAPGVSDRFSGSRSGTSASLTISGLQSEDEADYYAATWDDSLNGWVFGGGTKVTVLSGGSGSGSGSNPYLRLKVRRDHIIDDALVRLEMIAMENPADLKKQLYVEFEGEQGVDEGGVSKEFFQLVVEEIFNPDIGMFTYDESTKLFWFNPSSFETEGQFTLIGIVLGLAIYNNCILDVHFPMVVYRKLMGKKGTFRDLGDSHPVLYQSLKDLLEYEGNVEDDMMITFQISQTDLFGNPMMYDLKENGDKIPITNENRKEFVNLYSDYILNKSVEKQFKAFRRGFHMVTNESPLKYLFRPEEIELLICGSRNLDFQALEETTEYDGGYTRDSVLIREFWEIVHSFTDEQKRLFLQFTTGTDRAPVGGLGKLKMIIAKNGPDTERLPTSHTCFNVLLLPEYSSKEKLKERLLKAITYAKGFGML

SEQ ID NO: 520 - protein, 480 aa, synthetic construct
  source 1..480: note = VL12.3-(GS)5-E6AP peptide
GSQPVLTQSPSVSAAPRQRVTISVSGSNSNIGSNTVNWIQQLPGRAPELLMYDDDLLAPGVSDRFSGSRSGTSASLTISGLQSEDEADYYAATWDDSLNGWVFGGGTKVTVLSGGSGSGSGSGSNPYLRLKVRRDHIIDDALVRLEMIAMENPADLKKQLYVEFEGEQGVDEGGVSKEFFQLVVEEIFNPDIGMFTYDESTKLFWFNPSSFETEGQFTLIGIVLGLAIYNNCILDVHFPMVVYRKLMGKKGTFRDLGDSHPVLYQSLKDLLEYEGNVEDDMMITFQISQTDLFGNPMMYDLKENGDKIPITNENRKEFVNLYSDYILNKSVEKQFKAFRRGFHMVTNESPLKYLFRPEEIELLICGSRNLDFQALEETTEYDGGYTRDSVLIREFWEIVHSFTDEQKRLFLQFTTGTDRAPVGGLGKLKMIIAKNGPDTERLPTSHTCFNVLLLPEYSSKEKLKERLLKAITYAKGFGML

SEQ ID NO: 521 - protein, 482 aa, synthetic construct
  source 1..482: note = VL12.3-(GS)6-E6AP peptide
GSQPVLTQSPSVSAAPRQRVTISVSGSNSNIGSNTVNWIQQLPGRAPELLMYDDDLLAPGVSDRFSGSRSGTSASLTISGLQSEDEADYYAATWDDSLNGWVFGGGTKVTVLSGGSGSGSGSGSGSNPYLRLKVRRDHIIDDALVRLEMIAMENPADLKKQLYVEFEGEQGVDEGGVSKEFFQLVVEEIFNPDIGMFTYDESTKLFWFNPSSFETEGQFTLIGIVLGLAIYNNCILDVHFPMVVYRKLMGKKGTFRDLGDSHPVLYQSLKDLLEYEGNVEDDMMITFQISQTDLFGNPMMYDLKENGDKIPITNENRKEFVNLYSDYILNKSVEKQFKAFRRGFHMVTNESPLKYLFRPEEIELLICGSRNLDFQALEETTEYDGGYTRDSVLIREFWEIVHSFTDEQKRLFLQFTTGTDRAPVGGLGKLKMIIAKNGPDTERLPTSHTCFNVLLLPEYSSKEKLKERLLKAITYAKGFGML

SEQ ID NO: 522 - protein, 488 aa, synthetic construct
  source 1..488: note = HA-VL12.3-(GS)1-E6AP peptide
MYPYDVPDYAGSGSGSGSQPVLTQSPSVSAAPRQRVTISVSGSNSNIGSNTVNWIQQLPGRAPELLMYDDDLLAPGVSDRFSGSRSGTSASLTISGLQSEDEADYYAATWDDSLNGWVFGGGTKVTVLSGGSNPYLRLKVRRDHIIDDALVRLEMIAMENPADLKKQLYVEFEGEQGVDEGGVSKEFFQLVVEEIFNPDIGMFTYDESTKLFWFNPSSFETEGQFTLIGIVLGLAIYNNCILDVHFPMVVYRKLMGKKGTFRDLGDSHPVLYQSLKDLLEYEGNVEDDMMITFQISQTDLFGNPMMYDLKENGDKIPITNENRKEFVNLYSDYILNKSVEKQFKAFRRGFHMVTNESPLKYLFRPEEIELLICGSRNLDFQALEETTEYDGGYTRDSVLIREFWEIVHSFTDEQKRLFLQFTTGTDRAPVGGLGKLKMIIAKNGPDTERLPTSHTCFNVLLLPEYSSKEKLKERLLKAITYAKGFGML

SEQ ID NO: 523 - protein, 490 aa, synthetic construct
  source 1..490: note = HA-VL12.3-(GS)2-E6AP peptide
MYPYDVPDYAGSGSGSGSQPVLTQSPSVSAAPRQRVTISVSGSNSNIGSNTVNWIQQLPGRAPELLMYDDDLLAPGVSDRFSGSRSGTSASLTISGLQSEDEADYYAATWDDSLNGWVFGGGTKVTVLSGGSGSNPYLRLKVRRDHIIDDALVRLEMIAMENPADLKKQLYVEFEGEQGVDEGGVSKEFFQLVVEEIFNPDIGMFTYDESTKLFWFNPSSFETEGQFTLIGIVLGLAIYNNCILDVHFPMVVYRKLMGKKGTFRDLGDSHPVLYQSLKDLLEYEGNVEDDMMITFQISQTDLFGNPMMYDLKENGDKIPITNENRKEFVNLYSDYILNKSVEKQFKAFRRGFHMVTNESPLKYLFRPEEIELLICGSRNLDFQALEETTEYDGGYTRDSVLIREFWEIVHSFTDEQKRLFLQFTTGTDRAPVGGLGKLKMIIAKNGPDTERLPTSHTCFNVLLLPEYSSKEKLKERLLKAITYAKGFGML

SEQ ID NO: 524 - protein, 492 aa, synthetic construct
  source 1..492: note = HA-VL12.3-(GS)3-E6AP peptide
MYPYDVPDYAGSGSGSGSQPVLTQSPSVSAAPRQRVTISVSGSNSNIGSNTVNWIQQLPGRAPELLMYDDDLLAPGVSDRFSGSRSGTSASLTISGLQSEDEADYYAATWDDSLNGWVFGGGTKVTVLSGGSGSGSNPYLRLKVRRDHIIDDALVRLEMIAMENPADLKKQLYVEFEGEQGVDEGGVSKEFFQLVVEEIFNPDIGMFTYDESTKLFWFNPSSFETEGQFTLIGIVLGLAIYNNCILDVHFPMVVYRKLMGKKGTFRDLGDSHPVLYQSLKDLLEYEGNVEDDMMITFQISQTDLFGNPMMYDLKENGDKIPITNENRKEFVNLYSDYILNKSVEKQFKAFRRGFHMVTNESPLKYLFRPEEIELLICGSRNLDFQALEETTEYDGGYTRDSVLIREFWEIVHSFTDEQKRLFLQFTTGTDRAPVGGLGKLKMIIAKNGPDTERLPTSHTCFNVLLLPEYSSKEKLKERLLKAITYAKGFGML

SEQ ID NO: 525 - protein, 494 aa, synthetic construct
  source 1..494: note = HA-VL12.3-(GS)4-E6AP peptide
MYPYDVPDYAGSGSGSGSQPVLTQSPSVSAAPRQRVTISVSGSNSNIGSNTVNWIQQLPGRAPELLMYDDDLLAPGVSDRFSGSRSGTSASLTISGLQSEDEADYYAATWDDSLNGWVFGGGTKVTVLSGGSGSGSGSNPYLRLKVRRDHIIDDALVRLEMIAMENPADLKKQLYVEFEGEQGVDEGGVSKEFFQLVVEEIFNPDIGMFTYDESTKLFWFNPSSFETEGQFTLIGIVLGLAIYNNCILDVHFPMVVYRKLMGKKGTFRDLGDSHPVLYQSLKDLLEYEGNVEDDMMITFQISQTDLFGNPMMYDLKENGDKIPITNENRKEFVNLYSDYILNKSVEKQFKAFRRGFHMVTNESPLKYLFRPEEIELLICGSRNLDFQALEETTEYDGGYTRDSVLIREFWEIVHSFTDEQKRLFLQFTTGTDRAPVGGLGKLKMIIAKNGPDTERLPTSHTCFNVLLLPEYSSKEKLKERLLKAITYAKGFGML

SEQ ID NO: 526 - protein, 496 aa, synthetic construct
  source 1..496: note = HA-VL12.3-(GS)5-E6AP peptide
MYPYDVPDYAGSGSGSGSQPVLTQSPSVSAAPRQRVTISVSGSNSNIGSNTVNWIQQLPGRAPELLMYDDDLLAPGVSDRFSGSRSGTSASLTISGLQSEDEADYYAATWDDSLNGWVFGGGTKVTVLSGGSGSGSGSGSNPYLRLKVRRDHIIDDALVRLEMIAMENPADLKKQLYVEFEGEQGVDEGGVSKEFFQLVVEEIFNPDIGMFTYDESTKLFWFNPSSFETEGQFTLIGIVLGLAIYNNCILDVHFPMVVYRKLMGKKGTFRDLGDSHPVLYQSLKDLLEYEGNVEDDMMITFQISQTDLFGNPMMYDLKENGDKIPITNENRKEFVNLYSDYILNKSVEKQFKAFRRGFHMVTNESPLKYLFRPEEIELLICGSRNLDFQALEETTEYDGGYTRDSVLIREFWEIVHSFTDEQKRLFLQFTTGTDRAPVGGLGKLKMIIAKNGPDTERLPTSHTCFNVLLLPEYSSKEKLKERLLKAITYAKGFGML

SEQ ID NO: 527 - protein, 498 aa, synthetic construct
  source 1..498: note = HA-VL12.3-(GS)6-E6AP peptide
MYPYDVPDYAGSGSGSGSQPVLTQSPSVSAAPRQRVTISVSGSNSNIGSNTVNWIQQLPGRAPELLMYDDDLLAPGVSDRFSGSRSGTSASLTISGLQSEDEADYYAATWDDSLNGWVFGGGTKVTVLSGGSGSGSGSGSGSNPYLRLKVRRDHIIDDALVRLEMIAMENPADLKKQLYVEFEGEQGVDEGGVSKEFFQLVVEEIFNPDIGMFTYDESTKLFWFNPSSFETEGQFTLIGIVLGLAIYNNCILDVHFPMVVYRKLMGKKGTFRDLGDSHPVLYQSLKDLLEYEGNVEDDMMITFQISQTDLFGNPMMYDLKENGDKIPITNENRKEFVNLYSDYILNKSVEKQFKAFRRGFHMVTNESPLKYLFRPEEIELLICGSRNLDFQALEETTEYDGGYTRDSVLIREFWEIVHSFTDEQKRLFLQFTTGTDRAPVGGLGKLKMIIAKNGPDTERLPTSHTCFNVLLLPEYSSKEKLKERLLKAITYAKGFGML

SEQ ID NO: 528 - protein, 403 aa, synthetic construct
  source 1..403: note = FBXW7b-(GS)1-VL12.3 peptide
CVPRSGLILSCICLYCGVLLPVLLPNLPFLTCLSMSTLESVTYLPEKGLYCQRLPSSRTHGGTESLKGKNTENMGFYGTLKMIFYKMKRKLDHGSEVRSFSLGKKPCKVSEYTSTTGLVPCSATPTTFGDLRAANGQGQQRRRITSVQPPTGLQEWLKMFQSWSGPEKLLALDELIDSCEPTQVKHMMQVIEPQFQRDFISLLPKELALYVLSFLEPKDLLQAAQTCRYWRILAEDNLLWREKCKEEGIDEPLHIKRRKVIKPGFIHSPWKSAYIRQHRIDTNSRRGGSGSQPVLTQSPSVSAAPRQRVTISVSGSNSNIGSNTVNWIQQLPGRAPELLMYDDDLLAPGVSDRFSGSRSGTSASLTISGLQSEDEADYYAATWDDSLNGWVFGGGTKVTVLSG

SEQ ID NO: 529 - protein, 405 aa, synthetic construct
  source 1..405: note = FBXW7b-(GS)2-VL12.3 peptide
CVPRSGLILSCICLYCGVLLPVLLPNLPFLTCLSMSTLESVTYLPEKGLYCQRLPSSRTHGGTESLKGKNTENMGFYGTLKMIFYKMKRKLDHGSEVRSFSLGKKPCKVSEYTSTTGLVPCSATPTTFGDLRAANGQGQQRRRITSVQPPTGLQEWLKMFQSWSGPEKLLALDELIDSCEPTQVKHMMQVIEPQFQRDFISLLPKELALYVLSFLEPKDLLQAAQTCRYWRILAEDNLLWREKCKEEGIDEPLHIKRRKVIKPGFIHSPWKSAYIRQHRIDTNSRRGGSGSGSQPVLTQSPSVSAAPRQRVTISVSGSNSNIGSNTVNWIQQLPGRAPELLMYDDDLLAPGVSDRFSGSRSGTSASLTISGLQSEDEADYYAATWDDSLNGWVFGGGTKVTVLSG

SEQ ID NO: 530 - protein, 407 aa, synthetic construct
  source 1..407: note = FBXW7b-(GS)3-VL12.3 peptide
CVPRSGLILSCICLYCGVLLPVLLPNLPFLTCLSMSTLESVTYLPEKGLYCQRLPSSRTHGGTESLKGKNTENMGFYGTLKMIFYKMKRKLDHGSEVRSFSLGKKPCKVSEYTSTTGLVPCSATPTTFGDLRAANGQGQQRRRITSVQPPTGLQEWLKMFQSWSGPEKLLALDELIDSCEPTQVKHMMQVIEPQFQRDFISLLPKELALYVLSFLEPKDLLQAAQTCRYWRILAEDNLLWREKCKEEGIDEPLHIKRRKVIKPGFIHSPWKSAYIRQHRIDTNSRRGGSGSGSGSQPVLTQSPSVSAAPRQRVTISVSGSNSNIGSNTVNWIQQLPGRAPELLMYDDDLLAPGVSDRFSGSRSGTSASLTISGLQSEDEADYYAATWDDSLNGWVFGGGTKVTVLSG

SEQ ID NO: 531 - protein, 409 aa, synthetic construct
  source 1..409: note = FBXW7b-(GS)4-VL12.3 peptide
CVPRSGLILSCICLYCGVLLPVLLPNLPFLTCLSMSTLESVTYLPEKGLYCQRLPSSRTHGGTESLKGKNTENMGFYGTLKMIFYKMKRKLDHGSEVRSFSLGKKPCKVSEYTSTTGLVPCSATPTTFGDLRAANGQGQQRRRITSVQPPTGLQEWLKMFQSWSGPEKLLALDELIDSCEPTQVKHMMQVIEPQFQRDFISLLPKELALYVLSFLEPKDLLQAAQTCRYWRILAEDNLLWREKCKEEGIDEPLHIKRRKVIKPGFIHSPWKSAYIRQHRIDTNSRRGGSGSGSGSGSQPVLTQSPSVSAAPRQRVTISVSGSNSNIGSNTVNWIQQLPGRAPELLMYDDDLLAPGVSDRFSGSRSGTSASLTISGLQSEDEADYYAATWDDSLNGWVFGGGTKVTVLSG

SEQ ID NO: 532 - protein, 411 aa, synthetic construct
  source 1..411: note = FBXW7b-(GS)5-VL12.3 peptide
CVPRSGLILSCICLYCGVLLPVLLPNLPFLTCLSMSTLESVTYLPEKGLYCQRLPSSRTHGGTESLKGKNTENMGFYGTLKMIFYKMKRKLDHGSEVRSFSLGKKPCKVSEYTSTTGLVPCSATPTTFGDLRAANGQGQQRRRITSVQPPTGLQEWLKMFQSWSGPEKLLALDELIDSCEPTQVKHMMQVIEPQFQRDFISLLPKELALYVLSFLEPKDLLQAAQTCRYWRILAEDNLLWREKCKEEGIDEPLHIKRRKVIKPGFIHSPWKSAYIRQHRIDTNSRRGGSGSGSGSGSGSQPVLTQSPSVSAAPRQRVTISVSGSNSNIGSNTVNWIQQLPGRAPELLMYDDDLLAPGVSDRFSGSRSGTSASLTISGLQSEDEADYYAATWDDSLNGWVFGGGTKVTVLSG

SEQ ID NO: 533 - protein, 413 aa, synthetic construct
  source 1..413: note = FBXW7b-(GS)6-VL12.3 peptide
CVPRSGLILSCICLYCGVLLPVLLPNLPFLTCLSMSTLESVTYLPEKGLYCQRLPSSRTHGGTESLKGKNTENMGFYGTLKMIFYKMKRKLDHGSEVRSFSLGKKPCKVSEYTSTTGLVPCSATPTTFGDLRAANGQGQQRRRITSVQPPTGLQEWLKMFQSWSGPEKLLALDELIDSCEPTQVKHMMQVIEPQFQRDFISLLPKELALYVLSFLEPKDLLQAAQTCRYWRILAEDNLLWREKCKEEGIDEPLHIKRRKVIKPGFIHSPWKSAYIRQHRIDTNSRRGGSGSGSGSGSGSGSQPVLTQSPSVSAAPRQRVTISVSGSNSNIGSNTVNWIQQLPGRAPELLMYDDDLLAPGVSDRFSGSRSGTSASLTISGLQSEDEADYYAATWDDSLNGWVFGGGTKVTVLSG

SEQ ID NO: 534 - protein, 413 aa, synthetic construct
  source 1..413: note = HA-FBXW7b-(GS)1-VL12.3 peptide
MYPYDVPDYACVPRSGLILSCICLYCGVLLPVLLPNLPFLTCLSMSTLESVTYLPEKGLYCQRLPSSRTHGGTESLKGKNTENMGFYGTLKMIFYKMKRKLDHGSEVRSFSLGKKPCKVSEYTSTTGLVPCSATPTTFGDLRAANGQGQQRRRITSVQPPTGLQEWLKMFQSWSGPEKLLALDELIDSCEPTQVKHMMQVIEPQFQRDFISLLPKELALYVLSFLEPKDLLQAAQTCRYWRILAEDNLLWREKCKEEGIDEPLHIKRRKVIKPGFIHSPWKSAYIRQHRIDTNSRRGGSGSQPVLTQSPSVSAAPRQRVTISVSGSNSNIGSNTVNWIQQLPGRAPELLMYDDDLLAPGVSDRFSGSRSGTSASLTISGLQSEDEADYYAATWDDSLNGWVFGGGTKVTVLSG

SEQ ID NO: 535 - protein, 415 aa, synthetic construct
  source 1..415: note = HA-FBXW7b-(GS)2-VL12.3 peptide
MYPYDVPDYACVPRSGLILSCICLYCGVLLPVLLPNLPFLTCLSMSTLESVTYLPEKGLYCQRLPSSRTHGGTESLKGKNTENMGFYGTLKMIFYKMKRKLDHGSEVRSFSLGKKPCKVSEYTSTTGLVPCSATPTTFGDLRAANGQGQQRRRITSVQPPTGLQEWLKMFQSWSGPEKLLALDELIDSCEPTQVKHMMQVIEPQFQRDFISLLPKELALYVLSFLEPKDLLQAAQTCRYWRILAEDNLLWREKCKEEGIDEPLHIKRRKVIKPGFIHSPWKSAYIRQHRIDTNSRRGGSGSGSQPVLTQSPSVSAAPRQRVTISVSGSNSNIGSNTVNWIQQLPGRAPELLMYDDDLLAPGVSDRFSGSRSGTSASLTISGLQSEDEADYYAATWDDSLNGWVFGGGTKVTVLSG

SEQ ID NO: 536 - protein, 417 aa, synthetic construct
  source 1..417: note = HA-FBXW7b-(GS)3-VL12.3 peptide
MYPYDVPDYACVPRSGLILSCICLYCGVLLPVLLPNLPFLTCLSMSTLESVTYLPEKGLYCQRLPSSRTHGGTESLKGKNTENMGFYGTLKMIFYKMKRKLDHGSEVRSFSLGKKPCKVSEYTSTTGLVPCSATPTTFGDLRAANGQGQQRRRITSVQPPTGLQEWLKMFQSWSGPEKLLALDELIDSCEPTQVKHMMQVIEPQFQRDFISLLPKELALYVLSFLEPKDLLQAAQTCRYWRILAEDNLLWREKCKEEGIDEPLHIKRRKVIKPGFIHSPWKSAYIRQHRIDTNSRRGGSGSGSGSQPVLTQSPSVSAAPRQRVTISVSGSNSNIGSNTVNWIQQLPGRAPELLMYDDDLLAPGVSDRFSGSRSGTSASLTISGLQSEDEADYYAATWDDSLNGWVFGGGTKVTVLSG

SEQ ID NO: 537 - protein, 419 aa, synthetic construct
  source 1..419: note = HA-FBXW7b-(GS)4-VL12.3 peptide
MYPYDVPDYACVPRSGLILSCICLYCGVLLPVLLPNLPFLTCLSMSTLESVTYLPEKGLYCQRLPSSRTHGGTESLKGKNTENMGFYGTLKMIFYKMKRKLDHGSEVRSFSLGKKPCKVSEYTSTTGLVPCSATPTTFGDLRAANGQGQQRRRITSVQPPTGLQEWLKMFQSWSGPEKLLALDELIDSCEPTQVKHMMQVIEPQFQRDFISLLPKELALYVLSFLEPKDLLQAAQTCRYWRILAEDNLLWREKCKEEGIDEPLHIKRRKVIKPGFIHSPWKSAYIRQHRIDTNSRRGGSGSGSGSGSQPVLTQSPSVSAAPRQRVTISVSGSNSNIGSNTVNWIQQLPGRAPELLMYDDDLLAPGVSDRFSGSRSGTSASLTISGLQSEDEADYYAATWDDSLNGWVFGGGTKVTVLSG

SEQ ID NO: 538 - protein, 421 aa, synthetic construct
  source 1..421: note = HA-FBXW7b-(GS)5-VL12.3 peptide
MYPYDVPDYACVPRSGLILSCICLYCGVLLPVLLPNLPFLTCLSMSTLESVTYLPEKGLYCQRLPSSRTHGGTESLKGKNTENMGFYGTLKMIFYKMKRKLDHGSEVRSFSLGKKPCKVSEYTSTTGLVPCSATPTTFGDLRAANGQGQQRRRITSVQPPTGLQEWLKMFQSWSGPEKLLALDELIDSCEPTQVKHMMQVIEPQFQRDFISLLPKELALYVLSFLEPKDLLQAAQTCRYWRILAEDNLLWREKCKEEGIDEPLHIKRRKVIKPGFIHSPWKSAYIRQHRIDTNSRRGGSGSGSGSGSGSQPVLTQSPSVSAAPRQRVTISVSGSNSNIGSNTVNWIQQLPGRAPELLMYDDDLLAPGVSDRFSGSRSGTSASLTISGLQSEDEADYYAATWDDSLNGWVFGGGTKVTVLSG

SEQ ID NO: 539 - protein, 423 aa, synthetic construct
  source 1..423: note = HA-FBXW7b-(GS)6-VL12.3 peptide
MYPYDVPDYACVPRSGLILSCICLYCGVLLPVLLPNLPFLTCLSMSTLESVTYLPEKGLYCQRLPSSRTHGGTESLKGKNTENMGFYGTLKMIFYKMKRKLDHGSEVRSFSLGKKPCKVSEYTSTTGLVPCSATPTTFGDLRAANGQGQQRRRITSVQPPTGLQEWLKMFQSWSGPEKLLALDELIDSCEPTQVKHMMQVIEPQFQRDFISLLPKELALYVLSFLEPKDLLQAAQTCRYWRILAEDNLLWREKCKEEGIDEPLHIKRRKVIKPGFIHSPWKSAYIRQHRIDTNSRRGGSGSGSGSGSGSGSQPVLTQSPSVSAAPRQRVTISVSGSNSNIGSNTVNWIQQLPGRAPELLMYDDDLLAPGVSDRFSGSRSGTSASLTISGLQSEDEADYYAATWDDSLNGWVFGGGTKVTVLSG

SEQ ID NO: 540 - protein, 437 aa, synthetic construct
  source 1..437: note = Keap1-(GS)1-VL12.3 peptide
QPDPRPSGAGACCRFLPLQSQCPEGAGDAVMYASTECKAEVTPSQHGNRTFSYTLEDHTKQAFGIMNELRLSQQLCDVTLQVKYQDAPAAQFMAHKVVLASSSPVFKAMFTNGLREQGMEVVSIEGIHPKVMERLIEFAYTASISMGEKCVLHVMNGAVMYQIDSVVRACSDFLVQQLDPSNAIGIANFAEQIGCVELHQRAREYIYMHFGEVAKQEEFFNLSHCQLVTLISRDDLNVRCESEVFHACINWVKYDCEQRRFYVQALLRAVRCHSLTPNFLQMQLQKCEILQSDSRCKDYLVKIFEELTLHKPTQVMPCRAPGSGSQPVLTQSPSVSAAPRQRVTISVSGSNSNIGSNTVNWIQQLPGRAPELLMYDDDLLAPGVSDRFSGSRSGTSASLTISGLQSEDEADYYAATWDDSLNGWVFGGGTKVTVLSG

SEQ ID NO: 541 - protein, 439 aa, synthetic construct
  source 1..439: note = Keap1-(GS)2-VL12.3 peptide
QPDPRPSGAGACCRFLPLQSQCPEGAGDAVMYASTECKAEVTPSQHGNRTFSYTLEDHTKQAFGIMNELRLSQQLCDVTLQVKYQDAPAAQFMAHKVVLASSSPVFKAMFTNGLREQGMEVVSIEGIHPKVMERLIEFAYTASISMGEKCVLHVMNGAVMYQIDSVVRACSDFLVQQLDPSNAIGIANFAEQIGCVELHQRAREYIYMHFGEVAKQEEFFNLSHCQLVTLISRDDLNVRCESEVFHACINWVKYDCEQRRFYVQALLRAVRCHSLTPNFLQMQLQKCEILQSDSRCKDYLVKIFEELTLHKPTQVMPCRAPGSGSGSQPVLTQSPSVSAAPRQRVTISVSGSNSNIGSNTVNWIQQLPGRAPELLMYDDDLLAPGVSDRFSGSRSGTSASLTISGLQSEDEADYYAATWDDSLNGWVFGGGTKVTVLSG

SEQ ID NO: 542 - protein, 441 aa, synthetic construct
  source 1..441: note = Keap1-(GS)3-VL12.3 peptide
QPDPRPSGAGACCRFLPLQSQCPEGAGDAVMYASTECKAEVTPSQHGNRTFSYTLEDHTKQAFGIMNELRLSQQLCDVTLQVKYQDAPAAQFMAHKVVLASSSPVFKAMFTNGLREQGMEVVSIEGIHPKVMERLIEFAYTASISMGEKCVLHVMNGAVMYQIDSVVRACSDFLVQQLDPSNAIGIANFAEQIGCVELHQRAREYIYMHFGEVAKQEEFFNLSHCQLVTLISRDDLNVRCESEVFHACINWVKYDCEQRRFYVQALLRAVRCHSLTPNFLQMQLQKCEILQSDSRCKDYLVKIFEELTLHKPTQVMPCRAPGSGSGSGSQPVLTQSPSVSAAPRQRVTISVSGSNSNIGSNTVNWIQQLPGRAPELLMYDDDLLAPGVSDRFSGSRSGTSASLTISGLQSEDEADYYAATWDDSLNGWVFGGGTKVTVLSG

SEQ ID NO: 543 - protein, 443 aa, synthetic construct
  source 1..443: note = Keap1-(GS)4-VL12.3 peptide
QPDPRPSGAGACCRFLPLQSQCPEGAGDAVMYASTECKAEVTPSQHGNRTFSYTLEDHTKQAFGIMNELRLSQQLCDVTLQVKYQDAPAAQFMAHKVVLASSSPVFKAMFTNGLREQGMEVVSIEGIHPKVMERLIEFAYTASISMGEKCVLHVMNGAVMYQIDSVVRACSDFLVQQLDPSNAIGIANFAEQIGCVELHQRAREYIYMHFGEVAKQEEFFNLSHCQLVTLISRDDLNVRCESEVFHACINWVKYDCEQRRFYVQALLRAVRCHSLTPNFLQMQLQKCEILQSDSRCKDYLVKIFEELTLHKPTQVMPCRAPGSGSGSGSGSQPVLTQSPSVSAAPRQRVTISVSGSNSNIGSNTVNWIQQLPGRAPELLMYDDDLLAPGVSDRFSGSRSGTSASLTISGLQSEDEADYYAATWDDSLNGWVFGGGTKVTVLSG

SEQ ID NO: 544 - protein, 445 aa, synthetic construct
  source 1..445: note = Keap1-(GS)5-VL12.3 peptide
QPDPRPSGAGACCRFLPLQSQCPEGAGDAVMYASTECKAEVTPSQHGNRTFSYTLEDHTKQAFGIMNELRLSQQLCDVTLQVKYQDAPAAQFMAHKVVLASSSPVFKAMFTNGLREQGMEVVSIEGIHPKVMERLIEFAYTASISMGEKCVLHVMNGAVMYQIDSVVRACSDFLVQQLDPSNAIGIANFAEQIGCVELHQRAREYIYMHFGEVAKQEEFFNLSHCQLVTLISRDDLNVRCESEVFHACINWVKYDCEQRRFYVQALLRAVRCHSLTPNFLQMQLQKCEILQSDSRCKDYLVKIFEELTLHKPTQVMPCRAPGSGSGSGSGSGSQPVLTQSPSVSAAPRQRVTISVSGSNSNIGSNTVNWIQQLPGRAPELLMYDDDLLAPGVSDRFSGSRSGTSASLTISGLQSEDEADYYAATWDDSLNGWVFGGGTKVTVLSG

SEQ ID NO: 545 - protein, 447 aa, synthetic construct
  source 1..447: note = Keap1-(GS)6-VL12.3 peptide
QPDPRPSGAGACCRFLPLQSQCPEGAGDAVMYASTECKAEVTPSQHGNRTFSYTLEDHTKQAFGIMNELRLSQQLCDVTLQVKYQDAPAAQFMAHKVVLASSSPVFKAMFTNGLREQGMEVVSIEGIHPKVMERLIEFAYTASISMGEKCVLHVMNGAVMYQIDSVVRACSDFLVQQLDPSNAIGIANFAEQIGCVELHQRAREYIYMHFGEVAKQEEFFNLSHCQLVTLISRDDLNVRCESEVFHACINWVKYDCEQRRFYVQALLRAVRCHSLTPNFLQMQLQKCEILQSDSRCKDYLVKIFEELTLHKPTQVMPCRAPGSGSGSGSGSGSGSQPVLTQSPSVSAAPRQRVTISVSGSNSNIGSNTVNWIQQLPGRAPELLMYDDDLLAPGVSDRFSGSRSGTSASLTISGLQSEDEADYYAATWDDSLNGWVFGGGTKVTVLSG

SEQ ID NO: 546 - protein, 453 aa, synthetic construct
  source 1..453: note = HA-Keap1-(GS)1-VL12.3 peptide
MYPYDVPDYAGSGSGSQPDPRPSGAGACCRFLPLQSQCPEGAGDAVMYASTECKAEVTPSQHGNRTFSYTLEDHTKQAFGIMNELRLSQQLCDVTLQVKYQDAPAAQFMAHKVVLASSSPVFKAMFTNGLREQGMEVVSIEGIHPKVMERLIEFAYTASISMGEKCVLHVMNGAVMYQIDSVVRACSDFLVQQLDPSNAIGIANFAEQIGCVELHQRAREYIYMHFGEVAKQEEFFNLSHCQLVTLISRDDLNVRCESEVFHACINWVKYDCEQRRFYVQALLRAVRCHSLTPNFLQMQLQKCEILQSDSRCKDYLVKIFEELTLHKPTQVMPCRAPGSGSQPVLTQSPSVSAAPRQRVTISVSGSNSNIGSNTVNWIQQLPGRAPELLMYDDDLLAPGVSDRFSGSRSGTSASLTISGLQSEDEADYYAATWDDSLNGWVFGGGTKVTVLSG

SEQ ID NO: 547 - protein, 455 aa, synthetic construct
  source 1..455: note = HA-Keap1-(GS)2-VL12.3 peptide
MYPYDVPDYAGSGSGSQPDPRPSGAGACCRFLPLQSQCPEGAGDAVMYASTECKAEVTPSQHGNRTFSYTLEDHTKQAFGIMNELRLSQQLCDVTLQVKYQDAPAAQFMAHKVVLASSSPVFKAMFTNGLREQGMEVVSIEGIHPKVMERLIEFAYTASISMGEKCVLHVMNGAVMYQIDSVVRACSDFLVQQLDPSNAIGIANFAEQIGCVELHQRAREYIYMHFGEVAKQEEFFNLSHCQLVTLISRDDLNVRCESEVFHACINWVKYDCEQRRFYVQALLRAVRCHSLTPNFLQMQLQKCEILQSDSRCKDYLVKIFEELTLHKPTQVMPCRAPGSGSGSQPVLTQSPSVSAAPRQRVTISVSGSNSNIGSNTVNWIQQLPGRAPELLMYDDDLLAPGVSDRFSGSRSGTSASLTISGLQSEDEADYYAATWDDSLNGWVFGGGTKVTVLSG

SEQ ID NO: 548 - protein, 457 aa, synthetic construct
  source 1..457: note = HA-Keap1-(GS)3-VL12.3 peptide
MYPYDVPDYAGSGSGSQPDPRPSGAGACCRFLPLQSQCPEGAGDAVMYASTECKAEVTPSQHGNRTFSYTLEDHTKQAFGIMNELRLSQQLCDVTLQVKYQDAPAAQFMAHKVVLASSSPVFKAMFTNGLREQGMEVVSIEGIHPKVMERLIEFAYTASISMGEKCVLHVMNGAVMYQIDSVVRACSDFLVQQLDPSNAIGIANFAEQIGCVELHQRAREYIYMHFGEVAKQEEFFNLSHCQLVTLISRDDLNVRCESEVFHACINWVKYDCEQRRFYVQALLRAVRCHSLTPNFLQMQLQKCEILQSDSRCKDYLVKIFEELTLHKPTQVMPCRAPGSGSGSGSQPVLTQSPSVSAAPRQRVTISVSGSNSNIGSNTVNWIQQLPGRAPELLMYDDDLLAPGVSDRFSGSRSGTSASLTISGLQSEDEADYYAATWDDSLNGWVFGGGTKVTVLSG

SEQ ID NO: 549 - protein, 459 aa, synthetic construct
  source 1..459: note = HA-Keap1-(GS)4-VL12.3 peptide
MYPYDVPDYAGSGSGSQPDPRPSGAGACCRFLPLQSQCPEGAGDAVMYASTECKAEVTPSQHGNRTFSYTLEDHTKQAFGIMNELRLSQQLCDVTLQVKYQDAPAAQFMAHKVVLASSSPVFKAMFTNGLREQGMEVVSIEGIHPKVMERLIEFAYTASISMGEKCVLHVMNGAVMYQIDSVVRACSDFLVQQLDPSNAIGIANFAEQIGCVELHQRAREYIYMHFGEVAKQEEFFNLSHCQLVTLISRDDLNVRCESEVFHACINWVKYDCEQRRFYVQALLRAVRCHSLTPNFLQMQLQKCEILQSDSRCKDYLVKIFEELTLHKPTQVMPCRAPGSGSGSGSGSQPVLTQSPSVSAAPRQRVTISVSGSNSNIGSNTVNWIQQLPGRAPELLMYDDDLLAPGVSDRFSGSRSGTSASLTISGLQSEDEADYYAATWDDSLNGWVFGGGTKVTVLSG

SEQ ID NO: 550 - protein, 461 aa, synthetic construct
  source 1..461: note = HA-Keap1-(GS)5-VL12.3 peptide
MYPYDVPDYAGSGSGSQPDPRPSGAGACCRFLPLQSQCPEGAGDAVMYASTECKAEVTPSQHGNRTFSYTLEDHTKQAFGIMNELRLSQQLCDVTLQVKYQDAPAAQFMAHKVVLASSSPVFKAMFTNGLREQGMEVVSIEGIHPKVMERLIEFAYTASISMGEKCVLHVMNGAVMYQIDSVVRACSDFLVQQLDPSNAIGIANFAEQIGCVELHQRAREYIYMHFGEVAKQEEFFNLSHCQLVTLISRDDLNVRCESEVFHACINWVKYDCEQRRFYVQALLRAVRCHSLTPNFLQMQLQKCEILQSDSRCKDYLVKIFEELTLHKPTQVMPCRAPGSGSGSGSGSGSQPVLTQSPSVSAAPRQRVTISVSGSNSNIGSNTVNWIQQLPGRAPELLMYDDDLLAPGVSDRFSGSRSGTSASLTISGLQSEDEADYYAATWDDSLNGWVFGGGTKVTVLSG

SEQ ID NO: 551 - protein, 463 aa, synthetic construct
  source 1..463: note = HA-Keap1-(GS)6-VL12.3 peptide
MYPYDVPDYAGSGSGSQPDPRPSGAGACCRFLPLQSQCPEGAGDAVMYASTECKAEVTPSQHGNRTFSYTLEDHTKQAFGIMNELRLSQQLCDVTLQVKYQDAPAAQFMAHKVVLASSSPVFKAMFTNGLREQGMEVVSIEGIHPKVMERLIEFAYTASISMGEKCVLHVMNGAVMYQIDSVVRACSDFLVQQLDPSNAIGIANFAEQIGCVELHQRAREYIYMHFGEVAKQEEFFNLSHCQLVTLISRDDLNVRCESEVFHACINWVKYDCEQRRFYVQALLRAVRCHSLTPNFLQMQLQKCEILQSDSRCKDYLVKIFEELTLHKPTQVMPCRAPGSGSGSGSGSGSGSQPVLTQSPSVSAAPRQRVTISVSGSNSNIGSNTVNWIQQLPGRAPELLMYDDDLLAPGVSDRFSGSRSGTSASLTISGLQSEDEADYYAATWDDSLNGWVFGGGTKVTVLSG

SEQ ID NO: 552 - protein, 243 aa, synthetic construct
  source 1..243: note = RNF125-(GS)1-VL12.3 peptide
GSVLSTDSGKSAPASATARALERRRDPELPVTSFDCAVCLEVLHQPVRTRCGHVFCRSCIATSLKNNKWTCPYCRAYLPSEGVPATDVAKRMKSEYKNCAECDTLVCLSEMRAHIRTCQKYIDKYGPGSGSQPVLTQSPSVSAAPRQRVTISVSGSNSNIGSNTVNWIQQLPGRAPELLMYDDDLLAPGVSDRFSGSRSGTSASLTISGLQSEDEADYYAATWDDSLNGWVFGGGTKVTVLSG

SEQ ID NO: 553 - protein, 245 aa, synthetic construct
  source 1..245: note = RNF125-(GS)2-VL12.3 peptide
GSVLSTDSGKSAPASATARALERRRDPELPVTSFDCAVCLEVLHQPVRTRCGHVFCRSCIATSLKNNKWTCPYCRAYLPSEGVPATDVAKRMKSEYKNCAECDTLVCLSEMRAHIRTCQKYIDKYGPGSGSGSQPVLTQSPSVSAAPRQRVTISVSGSNSNIGSNTVNWIQQLPGRAPELLMYDDDLLAPGVSDRFSGSRSGTSASLTISGLQSEDEADYYAATWDDSLNGWVFGGGTKVTVLSG

SEQ ID NO: 554 - protein, 247 aa, synthetic construct
  source 1..247: note = RNF125-(GS)3-VL12.3 peptide
GSVLSTDSGKSAPASATARALERRRDPELPVTSFDCAVCLEVLHQPVRTRCGHVFCRSCIATSLKNNKWTCPYCRAYLPSEGVPATDVAKRMKSEYKNCAECDTLVCLSEMRAHIRTCQKYIDKYGPGSGSGSGSQPVLTQSPSVSAAPRQRVTISVSGSNSNIGSNTVNWIQQLPGRAPELLMYDDDLLAPGVSDRFSGSRSGTSASLTISGLQSEDEADYYAATWDDSLNGWVFGGGTKVTVLSG

SEQ ID NO: 555 - protein, 249 aa, synthetic construct
  source 1..249: note = RNF125-(GS)4-VL12.3 peptide
GSVLSTDSGKSAPASATARALERRRDPELPVTSFDCAVCLEVLHQPVRTRCGHVFCRSCIATSLKNNKWTCPYCRAYLPSEGVPATDVAKRMKSEYKNCAECDTLVCLSEMRAHIRTCQKYIDKYGPGSGSGSGSGSQPVLTQSPSVSAAPRQRVTISVSGSNSNIGSNTVNWIQQLPGRAPELLMYDDDLLAPGVSDRFSGSRSGTSASLTISGLQSEDEADYYAATWDDSLNGWVFGGGTKVTVLSG

SEQ ID NO: 556 - protein, 251 aa, synthetic construct
  source 1..251: note = RNF125-(GS)5-VL12.3 peptide
GSVLSTDSGKSAPASATARALERRRDPELPVTSFDCAVCLEVLHQPVRTRCGHVFCRSCIATSLKNNKWTCPYCRAYLPSEGVPATDVAKRMKSEYKNCAECDTLVCLSEMRAHIRTCQKYIDKYGPGSGSGSGSGSGSQPVLTQSPSVSAAPRQRVTISVSGSNSNIGSNTVNWIQQLPGRAPELLMYDDDLLAPGVSDRFSGSRSGTSASLTISGLQSEDEADYYAATWDDSLNGWVFGGGTKVTVLSG

SEQ ID NO: 557 - protein, 253 aa, synthetic construct
  source 1..253: note = RNF125-(GS)6-VL12.3 peptide
GSVLSTDSGKSAPASATARALERRRDPELPVTSFDCAVCLEVLHQPVRTRCGHVFCRSCIATSLKNNKWTCPYCRAYLPSEGVPATDVAKRMKSEYKNCAECDTLVCLSEMRAHIRTCQKYIDKYGPGSGSGSGSGSGSGSQPVLTQSPSVSAAPRQRVTISVSGSNSNIGSNTVNWIQQLPGRAPELLMYDDDLLAPGVSDRFSGSRSGTSASLTISGLQSEDEADYYAATWDDSLNGWVFGGGTKVTVLSG

SEQ ID NO: 558 - protein, 259 aa, synthetic construct
  source 1..259: note = HA-RNF125-(GS)1-VL12.3 peptide
MYPYDVPDYAGSGSGSGSVLSTDSGKSAPASATARALERRRDPELPVTSFDCAVCLEVLHQPVRTRCGHVFCRSCIATSLKNNKWTCPYCRAYLPSEGVPATDVAKRMKSEYKNCAECDTLVCLSEMRAHIRTCQKYIDKYGPGSGSQPVLTQSPSVSAAPRQRVTISVSGSNSNIGSNTVNWIQQLPGRAPELLMYDDDLLAPGVSDRFSGSRSGTSASLTISGLQSEDEADYYAATWDDSLNGWVFGGGTKVTVLSG

SEQ ID NO: 559 - protein, 261 aa, synthetic construct
  source 1..261: note = HA-RNF125-(GS)2-VL12.3 peptide
MYPYDVPDYAGSGSGSGSVLSTDSGKSAPASATARALERRRDPELPVTSFDCAVCLEVLHQPVRTRCGHVFCRSCIATSLKNNKWTCPYCRAYLPSEGVPATDVAKRMKSEYKNCAECDTLVCLSEMRAHIRTCQKYIDKYGPGSGSGSQPVLTQSPSVSAAPRQRVTISVSGSNSNIGSNTVNWIQQLPGRAPELLMYDDDLLAPGVSDRFSGSRSGTSASLTISGLQSEDEADYYAATWDDSLNGWVFGGGTKVTVLSG

SEQ ID NO: 560 - protein, 263 aa, synthetic construct
  source 1..263: note = HA-RNF125-(GS)3-VL12.3 peptide
MYPYDVPDYAGSGSGSGSVLSTDSGKSAPASATARALERRRDPELPVTSFDCAVCLEVLHQPVRTRCGHVFCRSCIATSLKNNKWTCPYCRAYLPSEGVPATDVAKRMKSEYKNCAECDTLVCLSEMRAHIRTCQKYIDKYGPGSGSGSGSQPVLTQSPSVSAAPRQRVTISVSGSNSNIGSNTVNWIQQLPGRAPELLMYDDDLLAPGVSDRFSGSRSGTSASLTISGLQSEDEADYYAATWDDSLNGWVFGGGTKVTVLSG

SEQ ID NO: 561 - protein, 265 aa, synthetic construct
  source 1..265: note = HA-RNF125-(GS)4-VL12.3 peptide
MYPYDVPDYAGSGSGSGSVLSTDSGKSAPASATARALERRRDPELPVTSFDCAVCLEVLHQPVRTRCGHVFCRSCIATSLKNNKWTCPYCRAYLPSEGVPATDVAKRMKSEYKNCAECDTLVCLSEMRAHIRTCQKYIDKYGPGSGSGSGSGSQPVLTQSPSVSAAPRQRVTISVSGSNSNIGSNTVNWIQQLPGRAPELLMYDDDLLAPGVSDRFSGSRSGTSASLTISGLQSEDEADYYAATWDDSLNGWVFGGGTKVTVLSG

SEQ ID NO: 562 - protein, 267 aa, synthetic construct
  source 1..267: note = HA-RNF125-(GS)5-VL12.3 peptide
MYPYDVPDYAGSGSGSGSVLSTDSGKSAPASATARALERRRDPELPVTSFDCAVCLEVLHQPVRTRCGHVFCRSCIATSLKNNKWTCPYCRAYLPSEGVPATDVAKRMKSEYKNCAECDTLVCLSEMRAHIRTCQKYIDKYGPGSGSGSGSGSGSQPVLTQSPSVSAAPRQRVTISVSGSNSNIGSNTVNWIQQLPGRAPELLMYDDDLLAPGVSDRFSGSRSGTSASLTISGLQSEDEADYYAATWDDSLNGWVFGGGTKVTVLSG

SEQ ID NO: 563 - protein, 269 aa, synthetic construct
  source 1..269: note = HA-RNF125-(GS)6-VL12.3 peptide
MYPYDVPDYAGSGSGSGSVLSTDSGKSAPASATARALERRRDPELPVTSFDCAVCLEVLHQPVRTRCGHVFCRSCIATSLKNNKWTCPYCRAYLPSEGVPATDVAKRMKSEYKNCAECDTLVCLSEMRAHIRTCQKYIDKYGPGSGSGSGSGSGSGSQPVLTQSPSVSAAPRQRVTISVSGSNSNIGSNTVNWIQQLPGRAPELLMYDDDLLAPGVSDRFSGSRSGTSASLTISGLQSEDEADYYAATWDDSLNGWVFGGGTKVTVLSG

SEQ ID NO: 564 - protein, 443 aa, synthetic construct
  source 1..443: note = INT41-(GS)1-CHIP-NLS peptide
MAEVQLVVSGGGLVKPGGSMILSCAASGFTFSNYSMNWVRQAPGKGLEWVSSISSSSEYIYYADFVKGRFTISRDNAKNSLYLQMDSLRAEDTAVYYCAWPGYRKAWGRGTLVTVSSGGGGSGGGGSGGGGSQSVLTQPASVSGSPGQSITISCAGTSSDVGGYNYVSWYQQHPGKAPKLMIYEDSKRPSGVSNRFSGSKSGNTASLTISGLRAEDEADYYCSYCASKGHWLFGGGTKLAVLGAAAEQKLISGSRLNFGDDIPSALRIAKKKRWNSIEERRIHQESELHSYLSRLIAAERERELEECQRNHEGDEDDSHVRAQQACIEAKHDKYMADMDELFSQVDEKRKKRDIPDYLCGKISFELMREPCITPSGITYDRKDIEEHLQRVGHFDPVTRSPLTQEQLIPNLAMKEVIDAFISENGWVEDYGSGSPAAKRVKLD

SEQ ID NO: 565 - protein, 445 aa, synthetic construct
  source 1..445: note = INT41-(GS)2-CHIP-NLS peptide
MAEVQLVVSGGGLVKPGGSMILSCAASGFTFSNYSMNWVRQAPGKGLEWVSSISSSSEYIYYADFVKGRFTISRDNAKNSLYLQMDSLRAEDTAVYYCAWPGYRKAWGRGTLVTVSSGGGGSGGGGSGGGGSQSVLTQPASVSGSPGQSITISCAGTSSDVGGYNYVSWYQQHPGKAPKLMIYEDSKRPSGVSNRFSGSKSGNTASLTISGLRAEDEADYYCSYCASKGHWLFGGGTKLAVLGAAAEQKLISGSGSRLNFGDDIPSALRIAKKKRWNSIEERRIHQESELHSYLSRLIAAERERELEECQRNHEGDEDDSHVRAQQACIEAKHDKYMADMDELFSQVDEKRKKRDIPDYLCGKISFELMREPCITPSGITYDRKDIEEHLQRVGHFDPVTRSPLTQEQLIPNLAMKEVIDAFISENGWVEDYGSGSPAAKRVKLD

SEQ ID NO: 566 - protein, 447 aa, synthetic construct
  source 1..447: note = INT41-(GS)3-CHIP-NLS peptide
MAEVQLVVSGGGLVKPGGSMILSCAASGFTFSNYSMNWVRQAPGKGLEWVSSISSSSEYIYYADFVKGRFTISRDNAKNSLYLQMDSLRAEDTAVYYCAWPGYRKAWGRGTLVTVSSGGGGSGGGGSGGGGSQSVLTQPASVSGSPGQSITISCAGTSSDVGGYNYVSWYQQHPGKAPKLMIYEDSKRPSGVSNRFSGSKSGNTASLTISGLRAEDEADYYCSYCASKGHWLFGGGTKLAVLGAAAEQKLISGSGSGSRLNFGDDIPSALRIAKKKRWNSIEERRIHQESELHSYLSRLIAAERERELEECQRNHEGDEDDSHVRAQQACIEAKHDKYMADMDELFSQVDEKRKKRDIPDYLCGKISFELMREPCITPSGITYDRKDIEEHLQRVGHFDPVTRSPLTQEQLIPNLAMKEVIDAFISENGWVEDYGSGSPAAKRVKLD

SEQ ID NO: 567 - protein, 449 aa, synthetic construct
  source 1..449: note = INT41-(GS)4-CHIP-NLS peptide
MAEVQLVVSGGGLVKPGGSMILSCAASGFTFSNYSMNWVRQAPGKGLEWVSSISSSSEYIYYADFVKGRFTISRDNAKNSLYLQMDSLRAEDTAVYYCAWPGYRKAWGRGTLVTVSSGGGGSGGGGSGGGGSQSVLTQPASVSGSPGQSITISCAGTSSDVGGYNYVSWYQQHPGKAPKLMIYEDSKRPSGVSNRFSGSKSGNTASLTISGLRAEDEADYYCSYCASKGHWLFGGGTKLAVLGAAAEQKLISGSGSGSGSRLNFGDDIPSALRIAKKKRWNSIEERRIHQESELHSYLSRLIAAERERELEECQRNHEGDEDDSHVRAQQACIEAKHDKYMADMDELFSQVDEKRKKRDIPDYLCGKISFELMREPCITPSGITYDRKDIEEHLQRVGHFDPVTRSPLTQEQLIPNLAMKEVIDAFISENGWVEDYGSGSPAAKRVKLD

SEQ ID NO: 568 - protein, 451 aa, synthetic construct
  source 1..451: note = INT41-(GS)5-CHIP-NLS peptide
MAEVQLVVSGGGLVKPGGSMILSCAASGFTFSNYSMNWVRQAPGKGLEWVSSISSSSEYIYYADFVKGRFTISRDNAKNSLYLQMDSLRAEDTAVYYCAWPGYRKAWGRGTLVTVSSGGGGSGGGGSGGGGSQSVLTQPASVSGSPGQSITISCAGTSSDVGGYNYVSWYQQHPGKAPKLMIYEDSKRPSGVSNRFSGSKSGNTASLTISGLRAEDEADYYCSYCASKGHWLFGGGTKLAVLGAAAEQKLISGSGSGSGSGSRLNFGDDIPSALRIAKKKRWNSIEERRIHQESELHSYLSRLIAAERERELEECQRNHEGDEDDSHVRAQQACIEAKHDKYMADMDELFSQVDEKRKKRDIPDYLCGKISFELMREPCITPSGITYDRKDIEEHLQRVGHFDPVTRSPLTQEQLIPNLAMKEVIDAFISENGWVEDYGSGSPAAKRVKLD

SEQ ID NO: 569 - protein, 453 aa, synthetic construct
  source 1..453: note = INT41-(GS)6-CHIP-NLS peptide
MAEVQLVVSGGGLVKPGGSMILSCAASGFTFSNYSMNWVRQAPGKGLEWVSSISSSSEYIYYADFVKGRFTISRDNAKNSLYLQMDSLRAEDTAVYYCAWPGYRKAWGRGTLVTVSSGGGGSGGGGSGGGGSQSVLTQPASVSGSPGQSITISCAGTSSDVGGYNYVSWYQQHPGKAPKLMIYEDSKRPSGVSNRFSGSKSGNTASLTISGLRAEDEADYYCSYCASKGHWLFGGGTKLAVLGAAAEQKLISGSGSGSGSGSGSRLNFGDDIPSALRIAKKKRWNSIEERRIHQESELHSYLSRLIAAERERELEECQRNHEGDEDDSHVRAQQACIEAKHDKYMADMDELFSQVDEKRKKRDIPDYLCGKISFELMREPCITPSGITYDRKDIEEHLQRVGHFDPVTRSPLTQEQLIPNLAMKEVIDAFISENGWVEDYGSGSPAAKRVKLD

SEQ ID NO: 570 - protein, 452 aa, synthetic construct
  source 1..452: note = INT41-(GS)1-CHIP-NLS-HA peptide
MAEVQLVVSGGGLVKPGGSMILSCAASGFTFSNYSMNWVRQAPGKGLEWVSSISSSSEYIYYADFVKGRFTISRDNAKNSLYLQMDSLRAEDTAVYYCAWPGYRKAWGRGTLVTVSSGGGGSGGGGSGGGGSQSVLTQPASVSGSPGQSITISCAGTSSDVGGYNYVSWYQQHPGKAPKLMIYEDSKRPSGVSNRFSGSKSGNTASLTISGLRAEDEADYYCSYCASKGHWLFGGGTKLAVLGAAAEQKLISGSRLNFGDDIPSALRIAKKKRWNSIEERRIHQESELHSYLSRLIAAERERELEECQRNHEGDEDDSHVRAQQACIEAKHDKYMADMDELFSQVDEKRKKRDIPDYLCGKISFELMREPCITPSGITYDRKDIEEHLQRVGHFDPVTRSPLTQEQLIPNLAMKEVIDAFISENGWVEDYGSGSPAAKRVKLDYPYDVPDYA

SEQ ID NO: 571 - protein, 454 aa, synthetic construct
  source 1..454: note = INT41-(GS)2-CHIP-NLS-HA peptide
MAEVQLVVSGGGLVKPGGSMILSCAASGFTFSNYSMNWVRQAPGKGLEWVSSISSSSEYIYYADFVKGRFTISRDNAKNSLYLQMDSLRAEDTAVYYCAWPGYRKAWGRGTLVTVSSGGGGSGGGGSGGGGSQSVLTQPASVSGSPGQSITISCAGTSSDVGGYNYVSWYQQHPGKAPKLMIYEDSKRPSGVSNRFSGSKSGNTASLTISGLRAEDEADYYCSYCASKGHWLFGGGTKLAVLGAAAEQKLISGSGSRLNFGDDIPSALRIAKKKRWNSIEERRIHQESELHSYLSRLIAAERERELEECQRNHEGDEDDSHVRAQQACIEAKHDKYMADMDELFSQVDEKRKKRDIPDYLCGKISFELMREPCITPSGITYDRKDIEEHLQRVGHFDPVTRSPLTQEQLIPNLAMKEVIDAFISENGWVEDYGSGSPAAKRVKLDYPYDVPDYA

SEQ ID NO: 572 - protein, 456 aa, synthetic construct
  source 1..456: note = INT41-(GS)3-CHIP-NLS-HA peptide
MAEVQLVVSGGGLVKPGGSMILSCAASGFTFSNYSMNWVRQAPGKGLEWVSSISSSSEYIYYADFVKGRFTISRDNAKNSLYLQMDSLRAEDTAVYYCAWPGYRKAWGRGTLVTVSSGGGGSGGGGSGGGGSQSVLTQPASVSGSPGQSITISCAGTSSDVGGYNYVSWYQQHPGKAPKLMIYEDSKRPSGVSNRFSGSKSGNTASLTISGLRAEDEADYYCSYCASKGHWLFGGGTKLAVLGAAAEQKLISGSGSGSRLNFGDDIPSALRIAKKKRWNSIEERRIHQESELHSYLSRLIAAERERELEECQRNHEGDEDDSHVRAQQACIEAKHDKYMADMDELFSQVDEKRKKRDIPDYLCGKISFELMREPCITPSGITYDRKDIEEHLQRVGHFDPVTRSPLTQEQLIPNLAMKEVIDAFISENGWVEDYGSGSPAAKRVKLDYPYDVPDYA

SEQ ID NO: 573 - protein, 458 aa, synthetic construct
  source 1..458: note = INT41-(GS)4-CHIP-NLS-HA peptide
MAEVQLVVSGGGLVKPGGSMILSCAASGFTFSNYSMNWVRQAPGKGLEWVSSISSSSEYIYYADFVKGRFTISRDNAKNSLYLQMDSLRAEDTAVYYCAWPGYRKAWGRGTLVTVSSGGGGSGGGGSGGGGSQSVLTQPASVSGSPGQSITISCAGTSSDVGGYNYVSWYQQHPGKAPKLMIYEDSKRPSGVSNRFSGSKSGNTASLTISGLRAEDEADYYCSYCASKGHWLFGGGTKLAVLGAAAEQKLISGSGSGSGSRLNFGDDIPSALRIAKKKRWNSIEERRIHQESELHSYLSRLIAAERERELEECQRNHEGDEDDSHVRAQQACIEAKHDKYMADMDELFSQVDEKRKKRDIPDYLCGKISFELMREPCITPSGITYDRKDIEEHLQRVGHFDPVTRSPLTQEQLIPNLAMKEVIDAFISENGWVEDYGSGSPAAKRVKLDYPYDVPDYA

SEQ ID NO: 574 - protein, 460 aa, synthetic construct
  source 1..460: note = INT41-(GS)5-CHIP-NLS-HA peptide
MAEVQLVVSGGGLVKPGGSMILSCAASGFTFSNYSMNWVRQAPGKGLEWVSSISSSSEYIYYADFVKGRFTISRDNAKNSLYLQMDSLRAEDTAVYYCAWPGYRKAWGRGTLVTVSSGGGGSGGGGSGGGGSQSVLTQPASVSGSPGQSITISCAGTSSDVGGYNYVSWYQQHPGKAPKLMIYEDSKRPSGVSNRFSGSKSGNTASLTISGLRAEDEADYYCSYCASKGHWLFGGGTKLAVLGAAAEQKLISGSGSGSGSGSRLNFGDDIPSALRIAKKKRWNSIEERRIHQESELHSYLSRLIAAERERELEECQRNHEGDEDDSHVRAQQACIEAKHDKYMADMDELFSQVDEKRKKRDIPDYLCGKISFELMREPCITPSGITYDRKDIEEHLQRVGHFDPVTRSPLTQEQLIPNLAMKEVIDAFISENGWVEDYGSGSPAAKRVKLDYPYDVPDYA

SEQ ID NO: 575 - protein, 462 aa, synthetic construct
  source 1..462: note = INT41-(GS)6-CHIP-NLS-HA peptide
MAEVQLVVSGGGLVKPGGSMILSCAASGFTFSNYSMNWVRQAPGKGLEWVSSISSSSEYIYYADFVKGRFTISRDNAKNSLYLQMDSLRAEDTAVYYCAWPGYRKAWGRGTLVTVSSGGGGSGGGGSGGGGSQSVLTQPASVSGSPGQSITISCAGTSSDVGGYNYVSWYQQHPGKAPKLMIYEDSKRPSGVSNRFSGSKSGNTASLTISGLRAEDEADYYCSYCASKGHWLFGGGTKLAVLGAAAEQKLISGSGSGSGSGSGSRLNFGDDIPSALRIAKKKRWNSIEERRIHQESELHSYLSRLIAAERERELEECQRNHEGDEDDSHVRAQQACIEAKHDKYMADMDELFSQVDEKRKKRDIPDYLCGKISFELMREPCITPSGITYDRKDIEEHLQRVGHFDPVTRSPLTQEQLIPNLAMKEVIDAFISENGWVEDYGSGSPAAKRVKLDYPYDVPDYA

SEQ ID NO: 576 - protein, 303 aa, synthetic construct
  source 1..303: note = NLS-DCAF1-(GS)1-INT41 peptide
PAAKRVKLDGSGSGSQAPINFTSRLNRRASFPKYGGVDGGCFDRHLIFSRGSAEVQLVVSGGGLVKPGGSMILSCAASGFTFSNYSMNWVRQAPGKGLEWVSSISSSSEYIYYADFVKGRFTISRDNAKNSLYLQMDSLRAEDTAVYYCAWPGYRKAWGRGTLVTVSSGGGGSGGGGSGGGGSQSVLTQPASVSGSPGQSITISCAGTSSDVGGYNYVSWYQQHPGKAPKLMIYEDSKRPSGVSNRFSGSKSGNTASLTISGLRAEDEADYYCSYCASKGHWLFGGGTKLAVLGAAAEQKLIS

SEQ ID NO: 577 - protein, 305 aa, synthetic construct
  source 1..305: note = NLS-DCAF1-(GS)2-INT41 peptide
PAAKRVKLDGSGSGSQAPINFTSRLNRRASFPKYGGVDGGCFDRHLIFSRGSGSAEVQLVVSGGGLVKPGGSMILSCAASGFTFSNYSMNWVRQAPGKGLEWVSSISSSSEYIYYADFVKGRFTISRDNAKNSLYLQMDSLRAEDTAVYYCAWPGYRKAWGRGTLVTVSSGGGGSGGGGSGGGGSQSVLTQPASVSGSPGQSITISCAGTSSDVGGYNYVSWYQQHPGKAPKLMIYEDSKRPSGVSNRFSGSKSGNTASLTISGLRAEDEADYYCSYCASKGHWLFGGGTKLAVLGAAAEQKLIS

SEQ ID NO: 578 - protein, 307 aa, synthetic construct
  source 1..307: note = NLS-DCAF1-(GS)3-INT41 peptide
PAAKRVKLDGSGSGSQAPINFTSRLNRRASFPKYGGVDGGCFDRHLIFSRGSGSGSAEVQLVVSGGGLVKPGGSMILSCAASGFTFSNYSMNWVRQAPGKGLEWVSSISSSSEYIYYADFVKGRFTISRDNAKNSLYLQMDSLRAEDTAVYYCAWPGYRKAWGRGTLVTVSSGGGGSGGGGSGGGGSQSVLTQPASVSGSPGQSITISCAGTSSDVGGYNYVSWYQQHPGKAPKLMIYEDSKRPSGVSNRFSGSKSGNTASLTISGLRAEDEADYYCSYCASKGHWLFGGGTKLAVLGAAAEQKLIS

SEQ ID NO: 579 - protein, 309 aa, synthetic construct
  source 1..309: note = NLS-DCAF1-(GS)4-INT41 peptide
PAAKRVKLDGSGSGSQAPINFTSRLNRRASFPKYGGVDGGCFDRHLIFSRGSGSGSGSAEVQLVVSGGGLVKPGGSMILSCAASGFTFSNYSMNWVRQAPGKGLEWVSSISSSSEYIYYADFVKGRFTISRDNAKNSLYLQMDSLRAEDTAVYYCAWPGYRKAWGRGTLVTVSSGGGGSGGGGSGGGGSQSVLTQPASVSGSPGQSITISCAGTSSDVGGYNYVSWYQQHPGKAPKLMIYEDSKRPSGVSNRFSGSKSGNTASLTISGLRAEDEADYYCSYCASKGHWLFGGGTKLAVLGAAAEQKLIS

SEQ ID NO: 580 - protein, 311 aa, synthetic construct
  source 1..311: note = NLS-DCAF1-(GS)5-INT41 peptide
PAAKRVKLDGSGSGSQAPINFTSRLNRRASFPKYGGVDGGCFDRHLIFSRGSGSGSGSGSAEVQLVVSGGGLVKPGGSMILSCAASGFTFSNYSMNWVRQAPGKGLEWVSSISSSSEYIYYADFVKGRFTISRDNAKNSLYLQMDSLRAEDTAVYYCAWPGYRKAWGRGTLVTVSSGGGGSGGGGSGGGGSQSVLTQPASVSGSPGQSITISCAGTSSDVGGYNYVSWYQQHPGKAPKLMIYEDSKRPSGVSNRFSGSKSGNTASLTISGLRAEDEADYYCSYCASKGHWLFGGGTKLAVLGAAAEQKLIS

SEQ ID NO: 581 - protein, 313 aa, synthetic construct
  source 1..313: note = NLS-DCAF1-(GS)6-INT41 peptide
PAAKRVKLDGSGSGSQAPINFTSRLNRRASFPKYGGVDGGCFDRHLIFSRGSGSGSGSGSGSAEVQLVVSGGGLVKPGGSMILSCAASGFTFSNYSMNWVRQAPGKGLEWVSSISSSSEYIYYADFVKGRFTISRDNAKNSLYLQMDSLRAEDTAVYYCAWPGYRKAWGRGTLVTVSSGGGGSGGGGSGGGGSQSVLTQPASVSGSPGQSITISCAGTSSDVGGYNYVSWYQQHPGKAPKLMIYEDSKRPSGVSNRFSGSKSGNTASLTISGLRAEDEADYYCSYCASKGHWLFGGGTKLAVLGAAAEQKLIS

SEQ ID NO: 582 - protein, 313 aa, synthetic construct
  source 1..313: note = HA-NLS-DCAF1-(GS)1-INT41 peptide
MYPYDVPDYAPAAKRVKLDGSGSGSQAPINFTSRLNRRASFPKYGGVDGGCFDRHLIFSRGSAEVQLVVSGGGLVKPGGSMILSCAASGFTFSNYSMNWVRQAPGKGLEWVSSISSSSEYIYYADFVKGRFTISRDNAKNSLYLQMDSLRAEDTAVYYCAWPGYRKAWGRGTLVTVSSGGGGSGGGGSGGGGSQSVLTQPASVSGSPGQSITISCAGTSSDVGGYNYVSWYQQHPGKAPKLMIYEDSKRPSGVSNRFSGSKSGNTASLTISGLRAEDEADYYCSYCASKGHWLFGGGTKLAVLGAAAEQKLIS

SEQ ID NO: 583 - protein, 315 aa, synthetic construct
  source 1..315: note = HA-NLS-DCAF1-(GS)2-INT41 peptide
MYPYDVPDYAPAAKRVKLDGSGSGSQAPINFTSRLNRRASFPKYGGVDGGCFDRHLIFSRGSGSAEVQLVVSGGGLVKPGGSMILSCAASGFTFSNYSMNWVRQAPGKGLEWVSSISSSSEYIYYADFVKGRFTISRDNAKNSLYLQMDSLRAEDTAVYYCAWPGYRKAWGRGTLVTVSSGGGGSGGGGSGGGGSQSVLTQPASVSGSPGQSITISCAGTSSDVGGYNYVSWYQQHPGKAPKLMIYEDSKRPSGVSNRFSGSKSGNTASLTISGLRAEDEADYYCSYCASKGHWLFGGGTKLAVLGAAAEQKLIS

SEQ ID NO: 584 - protein, 317 aa, synthetic construct
  source 1..317: note = HA-NLS-DCAF1-(GS)3-INT41 peptide
MYPYDVPDYAPAAKRVKLDGSGSGSQAPINFTSRLNRRASFPKYGGVDGGCFDRHLIFSRGSGSGSAEVQLVVSGGGLVKPGGSMILSCAASGFTFSNYSMNWVRQAPGKGLEWVSSISSSSEYIYYADFVKGRFTISRDNAKNSLYLQMDSLRAEDTAVYYCAWPGYRKAWGRGTLVTVSSGGGGSGGGGSGGGGSQSVLTQPASVSGSPGQSITISCAGTSSDVGGYNYVSWYQQHPGKAPKLMIYEDSKRPSGVSNRFSGSKSGNTASLTISGLRAEDEADYYCSYCASKGHWLFGGGTKLAVLGAAAEQKLIS

SEQ ID NO: 585 - protein, 319 aa, synthetic construct
  source 1..319: note = HA-NLS-DCAF1-(GS)4-INT41 peptide
MYPYDVPDYAPAAKRVKLDGSGSGSQAPINFTSRLNRRASFPKYGGVDGGCFDRHLIFSRGSGSGSGSAEVQLVVSGGGLVKPGGSMILSCAASGFTFSNYSMNWVRQAPGKGLEWVSSISSSSEYIYYADFVKGRFTISRDNAKNSLYLQMDSLRAEDTAVYYCAWPGYRKAWGRGTLVTVSSGGGGSGGGGSGGGGSQSVLTQPASVSGSPGQSITISCAGTSSDVGGYNYVSWYQQHPGKAPKLMIYEDSKRPSGVSNRFSGSKSGNTASLTISGLRAEDEADYYCSYCASKGHWLFGGGTKLAVLGAAAEQKLIS

SEQ ID NO: 586 - protein, 321 aa, synthetic construct
  source 1..321: note = HA-NLS-DCAF1-(GS)5-INT41 peptide
MYPYDVPDYAPAAKRVKLDGSGSGSQAPINFTSRLNRRASFPKYGGVDGGCFDRHLIFSRGSGSGSGSGSAEVQLVVSGGGLVKPGGSMILSCAASGFTFSNYSMNWVRQAPGKGLEWVSSISSSSEYIYYADFVKGRFTISRDNAKNSLYLQMDSLRAEDTAVYYCAWPGYRKAWGRGTLVTVSSGGGGSGGGGSGGGGSQSVLTQPASVSGSPGQSITISCAGTSSDVGGYNYVSWYQQHPGKAPKLMIYEDSKRPSGVSNRFSGSKSGNTASLTISGLRAEDEADYYCSYCASKGHWLFGGGTKLAVLGAAAEQKLIS

SEQ ID NO: 587 - protein, 323 aa, synthetic construct
  source 1..323: note = HA-NLS-DCAF1-(GS)6-INT41 peptide
MYPYDVPDYAPAAKRVKLDGSGSGSQAPINFTSRLNRRASFPKYGGVDGGCFDRHLIFSRGSGSGSGSGSGSAEVQLVVSGGGLVKPGGSMILSCAASGFTFSNYSMNWVRQAPGKGLEWVSSISSSSEYIYYADFVKGRFTISRDNAKNSLYLQMDSLRAEDTAVYYCAWPGYRKAWGRGTLVTVSSGGGGSGGGGSGGGGSQSVLTQPASVSGSPGQSITISCAGTSSDVGGYNYVSWYQQHPGKAPKLMIYEDSKRPSGVSNRFSGSKSGNTASLTISGLRAEDEADYYCSYCASKGHWLFGGGTKLAVLGAAAEQKLIS

SEQ ID NO: 588 - protein, 624 aa, synthetic construct
  source 1..624: note = NLS-INT41-(GS)1-E6AP peptide
PAAKRVKLDGSGSGSAEVQLVVSGGGLVKPGGSMILSCAASGFTFSNYSMNWVRQAPGKGLEWVSSISSSSEYIYYADFVKGRFTISRDNAKNSLYLQMDSLRAEDTAVYYCAWPGYRKAWGRGTLVTVSSGGGGSGGGGSGGGGSQSVLTQPASVSGSPGQSITISCAGTSSDVGGYNYVSWYQQHPGKAPKLMIYEDSKRPSGVSNRFSGSKSGNTASLTISGLRAEDEADYYCSYCASKGHWLFGGGTKLAVLGAAAEQKLISGSNPYLRLKVRRDHIIDDALVRLEMIAMENPADLKKQLYVEFEGEQGVDEGGVSKEFFQLVVEEIFNPDIGMFTYDESTKLFWFNPSSFETEGQFTLIGIVLGLAIYNNCILDVHFPMVVYRKLMGKKGTFRDLGDSHPVLYQSLKDLLEYEGNVEDDMMITFQISQTDLFGNPMMYDLKENGDKIPITNENRKEFVNLYSDYILNKSVEKQFKAFRRGFHMVTNESPLKYLFRPEEIELLICGSRNLDFQALEETTEYDGGYTRDSVLIREFWEIVHSFTDEQKRLFLQFTTGTDRAPVGGLGKLKMIIAKNGPDTERLPTSHTCFNVLLLPEYSSKEKLKERLLKAITYAKGFGML

SEQ ID NO: 589 - protein, 626 aa, synthetic construct
  source 1..626: note = NLS-INT41-(GS)2-E6AP peptide
PAAKRVKLDGSGSGSAEVQLVVSGGGLVKPGGSMILSCAASGFTFSNYSMNWVRQAPGKGLEWVSSISSSSEYIYYADFVKGRFTISRDNAKNSLYLQMDSLRAEDTAVYYCAWPGYRKAWGRGTLVTVSSGGGGSGGGGSGGGGSQSVLTQPASVSGSPGQSITISCAGTSSDVGGYNYVSWYQQHPGKAPKLMIYEDSKRPSGVSNRFSGSKSGNTASLTISGLRAEDEADYYCSYCASKGHWLFGGGTKLAVLGAAAEQKLISGSGSNPYLRLKVRRDHIIDDALVRLEMIAMENPADLKKQLYVEFEGEQGVDEGGVSKEFFQLVVEEIFNPDIGMFTYDESTKLFWFNPSSFETEGQFTLIGIVLGLAIYNNCILDVHFPMVVYRKLMGKKGTFRDLGDSHPVLYQSLKDLLEYEGNVEDDMMITFQISQTDLFGNPMMYDLKENGDKIPITNENRKEFVNLYSDYILNKSVEKQFKAFRRGFHMVTNESPLKYLFRPEEIELLICGSRNLDFQALEETTEYDGGYTRDSVLIREFWEIVHSFTDEQKRLFLQFTTGTDRAPVGGLGKLKMIIAKNGPDTERLPTSHTCFNVLLLPEYSSKEKLKERLLKAITYAKGFGML

SEQ ID NO: 590 - protein, 628 aa, synthetic construct
  source 1..628: note = NLS-INT41-(GS)3-E6AP peptide
PAAKRVKLDGSGSGSAEVQLVVSGGGLVKPGGSMILSCAASGFTFSNYSMNWVRQAPGKGLEWVSSISSSSEYIYYADFVKGRFTISRDNAKNSLYLQMDSLRAEDTAVYYCAWPGYRKAWGRGTLVTVSSGGGGSGGGGSGGGGSQSVLTQPASVSGSPGQSITISCAGTSSDVGGYNYVSWYQQHPGKAPKLMIYEDSKRPSGVSNRFSGSKSGNTASLTISGLRAEDEADYYCSYCASKGHWLFGGGTKLAVLGAAAEQKLISGSGSGSNPYLRLKVRRDHIIDDALVRLEMIAMENPADLKKQLYVEFEGEQGVDEGGVSKEFFQLVVEEIFNPDIGMFTYDESTKLFWFNPSSFETEGQFTLIGIVLGLAIYNNCILDVHFPMVVYRKLMGKKGTFRDLGDSHPVLYQSLKDLLEYEGNVEDDMMITFQISQTDLFGNPMMYDLKENGDKIPITNENRKEFVNLYSDYILNKSVEKQFKAFRRGFHMVTNESPLKYLFRPEEIELLICGSRNLDFQALEETTEYDGGYTRDSVLIREFWEIVHSFTDEQKRLFLQFTTGTDRAPVGGLGKLKMIIAKNGPDTERLPTSHTCFNVLLLPEYSSKEKLKERLLKAITYAKGFGML

SEQ ID NO: 591 - protein, 630 aa, synthetic construct
  source 1..630: note = NLS-INT41-(GS)4-E6AP peptide
PAAKRVKLDGSGSGSAEVQLVVSGGGLVKPGGSMILSCAASGFTFSNYSMNWVRQAPGKGLEWVSSISSSSEYIYYADFVKGRFTISRDNAKNSLYLQMDSLRAEDTAVYYCAWPGYRKAWGRGTLVTVSSGGGGSGGGGSGGGGSQSVLTQPASVSGSPGQSITISCAGTSSDVGGYNYVSWYQQHPGKAPKLMIYEDSKRPSGVSNRFSGSKSGNTASLTISGLRAEDEADYYCSYCASKGHWLFGGGTKLAVLGAAAEQKLISGSGSGSGSNPYLRLKVRRDHIIDDALVRLEMIAMENPADLKKQLYVEFEGEQGVDEGGVSKEFFQLVVEEIFNPDIGMFTYDESTKLFWFNPSSFETEGQFTLIGIVLGLAIYNNCILDVHFPMVVYRKLMGKKGTFRDLGDSHPVLYQSLKDLLEYEGNVEDDMMITFQISQTDLFGNPMMYDLKENGDKIPITNENRKEFVNLYSDYILNKSVEKQFKAFRRGFHMVTNESPLKYLFRPEEIELLICGSRNLDFQALEETTEYDGGYTRDSVLIREFWEIVHSFTDEQKRLFLQFTTGTDRAPVGGLGKLKMIIAKNGPDTERLPTSHTCFNVLLLPEYSSKEKLKERLLKAITYAKGFGML

SEQ ID NO: 592 - protein, 632 aa, synthetic construct
  source 1..632: note = NLS-INT41-(GS)5-E6AP peptide
PAAKRVKLDGSGSGSAEVQLVVSGGGLVKPGGSMILSCAASGFTFSNYSMNWVRQAPGKGLEWVSSISSSSEYIYYADFVKGRFTISRDNAKNSLYLQMDSLRAEDTAVYYCAWPGYRKAWGRGTLVTVSSGGGGSGGGGSGGGGSQSVLTQPASVSGSPGQSITISCAGTSSDVGGYNYVSWYQQHPGKAPKLMIYEDSKRPSGVSNRFSGSKSGNTASLTISGLRAEDEADYYCSYCASKGHWLFGGGTKLAVLGAAAEQKLISGSGSGSGSGSNPYLRLKVRRDHIIDDALVRLEMIAMENPADLKKQLYVEFEGEQGVDEGGVSKEFFQLVVEEIFNPDIGMFTYDESTKLFWFNPSSFETEGQFTLIGIVLGLAIYNNCILDVHFPMVVYRKLMGKKGTFRDLGDSHPVLYQSLKDLLEYEGNVEDDMMITFQISQTDLFGNPMMYDLKENGDKIPITNENRKEFVNLYSDYILNKSVEKQFKAFRRGFHMVTNESPLKYLFRPEEIELLICGSRNLDFQALEETTEYDGGYTRDSVLIREFWEIVHSFTDEQKRLFLQFTTGTDRAPVGGLGKLKMIIAKNGPDTERLPTSHTCFNVLLLPEYSSKEKLKERLLKAITYAKGFGML

SEQ ID NO: 593 - protein, 634 aa, synthetic construct
  source 1..634: note = NLS-INT41-(GS)6-E6AP peptide
PAAKRVKLDGSGSGSAEVQLVVSGGGLVKPGGSMILSCAASGFTFSNYSMNWVRQAPGKGLEWVSSISSSSEYIYYADFVKGRFTISRDNAKNSLYLQMDSLRAEDTAVYYCAWPGYRKAWGRGTLVTVSSGGGGSGGGGSGGGGSQSVLTQPASVSGSPGQSITISCAGTSSDVGGYNYVSWYQQHPGKAPKLMIYEDSKRPSGVSNRFSGSKSGNTASLTISGLRAEDEADYYCSYCASKGHWLFGGGTKLAVLGAAAEQKLISGSGSGSGSGSGSNPYLRLKVRRDHIIDDALVRLEMIAMENPADLKKQLYVEFEGEQGVDEGGVSKEFFQLVVEEIFNPDIGMFTYDESTKLFWFNPSSFETEGQFTLIGIVLGLAIYNNCILDVHFPMVVYRKLMGKKGTFRDLGDSHPVLYQSLKDLLEYEGNVEDDMMITFQISQTDLFGNPMMYDLKENGDKIPITNENRKEFVNLYSDYILNKSVEKQFKAFRRGFHMVTNESPLKYLFRPEEIELLICGSRNLDFQALEETTEYDGGYTRDSVLIREFWEIVHSFTDEQKRLFLQFTTGTDRAPVGGLGKLKMIIAKNGPDTERLPTSHTCFNVLLLPEYSSKEKLKERLLKAITYAKGFGML

SEQ ID NO: 594 - protein, 634 aa, synthetic construct
  source 1..634: note = HA-NLS-INT41-(GS)1-E6AP peptide
MYPYDVPDYAPAAKRVKLDGSGSGSAEVQLVVSGGGLVKPGGSMILSCAASGFTFSNYSMNWVRQAPGKGLEWVSSISSSSEYIYYADFVKGRFTISRDNAKNSLYLQMDSLRAEDTAVYYCAWPGYRKAWGRGTLVTVSSGGGGSGGGGSGGGGSQSVLTQPASVSGSPGQSITISCAGTSSDVGGYNYVSWYQQHPGKAPKLMIYEDSKRPSGVSNRFSGSKSGNTASLTISGLRAEDEADYYCSYCASKGHWLFGGGTKLAVLGAAAEQKLISGSNPYLRLKVRRDHIIDDALVRLEMIAMENPADLKKQLYVEFEGEQGVDEGGVSKEFFQLVVEEIFNPDIGMFTYDESTKLFWFNPSSFETEGQFTLIGIVLGLAIYNNCILDVHFPMVVYRKLMGKKGTFRDLGDSHPVLYQSLKDLLEYEGNVEDDMMITFQISQTDLFGNPMMYDLKENGDKIPITNENRKEFVNLYSDYILNKSVEKQFKAFRRGFHMVTNESPLKYLFRPEEIELLICGSRNLDFQALEETTEYDGGYTRDSVLIREFWEIVHSFTDEQKRLFLQFTTGTDRAPVGGLGKLKMIIAKNGPDTERLPTSHTCFNVLLLPEYSSKEKLKERLLKAITYAKGFGML

SEQ ID NO: 595 - protein, 636 aa, synthetic construct
  source 1..636: note = HA-NLS-INT41-(GS)2-E6AP peptide
MYPYDVPDYAPAAKRVKLDGSGSGSAEVQLVVSGGGLVKPGGSMILSCAASGFTFSNYSMNWVRQAPGKGLEWVSSISSSSEYIYYADFVKGRFTISRDNAKNSLYLQMDSLRAEDTAVYYCAWPGYRKAWGRGTLVTVSSGGGGSGGGGSGGGGSQSVLTQPASVSGSPGQSITISCAGTSSDVGGYNYVSWYQQHPGKAPKLMIYEDSKRPSGVSNRFSGSKSGNTASLTISGLRAEDEADYYCSYCASKGHWLFGGGTKLAVLGAAAEQKLISGSGSNPYLRLKVRRDHIIDDALVRLEMIAMENPADLKKQLYVEFEGEQGVDEGGVSKEFFQLVVEEIFNPDIGMFTYDESTKLFWFNPSSFETEGQFTLIGIVLGLAIYNNCILDVHFPMVVYRKLMGKKGTFRDLGDSHPVLYQSLKDLLEYEGNVEDDMMITFQISQTDLFGNPMMYDLKENGDKIPITNENRKEFVNLYSDYILNKSVEKQFKAFRRGFHMVTNESPLKYLFRPEEIELLICGSRNLDFQALEETTEYDGGYTRDSVLIREFWEIVHSFTDEQKRLFLQFTTGTDRAPVGGLGKLKMIIAKNGPDTERLPTSHTCFNVLLLPEYSSKEKLKERLLKAITYAKGFGML

SEQ ID NO: 596 - protein, 638 aa, synthetic construct
  source 1..638: note = HA-NLS-INT41-(GS)3-E6AP peptide
MYPYDVPDYAPAAKRVKLDGSGSGSAEVQLVVSGGGLVKPGGSMILSCAASGFTFSNYSMNWVRQAPGKGLEWVSSISSSSEYIYYADFVKGRFTISRDNAKNSLYLQMDSLRAEDTAVYYCAWPGYRKAWGRGTLVTVSSGGGGSGGGGSGGGGSQSVLTQPASVSGSPGQSITISCAGTSSDVGGYNYVSWYQQHPGKAPKLMIYEDSKRPSGVSNRFSGSKSGNTASLTISGLRAEDEADYYCSYCASKGHWLFGGGTKLAVLGAAAEQKLISGSGSGSNPYLRLKVRRDHIIDDALVRLEMIAMENPADLKKQLYVEFEGEQGVDEGGVSKEFFQLVVEEIFNPDIGMFTYDESTKLFWFNPSSFETEGQFTLIGIVLGLAIYNNCILDVHFPMVVYRKLMGKKGTFRDLGDSHPVLYQSLKDLLEYEGNVEDDMMITFQISQTDLFGNPMMYDLKENGDKIPITNENRKEFVNLYSDYILNKSVEKQFKAFRRGFHMVTNESPLKYLFRPEEIELLICGSRNLDFQALEETTEYDGGYTRDSVLIREFWEIVHSFTDEQKRLFLQFTTGTDRAPVGGLGKLKMIIAKNGPDTERLPTSHTCFNVLLLPEYSSKEKLKERLLKAITYAKGFGML

SEQ ID NO: 597 - protein, 640 aa, synthetic construct
  source 1..640: note = HA-NLS-INT41-(GS)4-E6AP peptide
MYPYDVPDYAPAAKRVKLDGSGSGSAEVQLVVSGGGLVKPGGSMILSCAASGFTFSNYSMNWVRQAPGKGLEWVSSISSSSEYIYYADFVKGRFTISRDNAKNSLYLQMDSLRAEDTAVYYCAWPGYRKAWGRGTLVTVSSGGGGSGGGGSGGGGSQSVLTQPASVSGSPGQSITISCAGTSSDVGGYNYVSWYQQHPGKAPKLMIYEDSKRPSGVSNRFSGSKSGNTASLTISGLRAEDEADYYCSYCASKGHWLFGGGTKLAVLGAAAEQKLISGSGSGSGSNPYLRLKVRRDHIIDDALVRLEMIAMENPADLKKQLYVEFEGEQGVDEGGVSKEFFQLVVEEIFNPDIGMFTYDESTKLFWFNPSSFETEGQFTLIGIVLGLAIYNNCILDVHFPMVVYRKLMGKKGTFRDLGDSHPVLYQSLKDLLEYEGNVEDDMMITFQISQTDLFGNPMMYDLKENGDKIPITNENRKEFVNLYSDYILNKSVEKQFKAFRRGFHMVTNESPLKYLFRPEEIELLICGSRNLDFQALEETTEYDGGYTRDSVLIREFWEIVHSFTDEQKRLFLQFTTGTDRAPVGGLGKLKMIIAKNGPDTERLPTSHTCFNVLLLPEYSSKEKLKERLLKAITYAKGFGML

SEQ ID NO: 598 - protein, 642 aa, synthetic construct
  source 1..642: note = HA-NLS-INT41-(GS)5-E6AP peptide
MYPYDVPDYAPAAKRVKLDGSGSGSAEVQLVVSGGGLVKPGGSMILSCAASGFTFSNYSMNWVRQAPGKGLEWVSSISSSSEYIYYADFVKGRFTISRDNAKNSLYLQMDSLRAEDTAVYYCAWPGYRKAWGRGTLVTVSSGGGGSGGGGSGGGGSQSVLTQPASVSGSPGQSITISCAGTSSDVGGYNYVSWYQQHPGKAPKLMIYEDSKRPSGVSNRFSGSKSGNTASLTISGLRAEDEADYYCSYCASKGHWLFGGGTKLAVLGAAAEQKLISGSGSGSGSGSNPYLRLKVRRDHIIDDALVRLEMIAMENPADLKKQLYVEFEGEQGVDEGGVSKEFFQLVVEEIFNPDIGMFTYDESTKLFWFNPSSFETEGQFTLIGIVLGLAIYNNCILDVHFPMVVYRKLMGKKGTFRDLGDSHPVLYQSLKDLLEYEGNVEDDMMITFQISQTDLFGNPMMYDLKENGDKIPITNENRKEFVNLYSDYILNKSVEKQFKAFRRGFHMVTNESPLKYLFRPEEIELLICGSRNLDFQALEETTEYDGGYTRDSVLIREFWEIVHSFTDEQKRLFLQFTTGTDRAPVGGLGKLKMIIAKNGPDTERLPTSHTCFNVLLLPEYSSKEKLKERLLKAITYAKGFGML

SEQ ID NO: 599 - protein, 644 aa, synthetic construct
  source 1..644: note = HA-NLS-INT41-(GS)6-E6AP peptide
MYPYDVPDYAPAAKRVKLDGSGSGSAEVQLVVSGGGLVKPGGSMILSCAASGFTFSNYSMNWVRQAPGKGLEWVSSISSSSEYIYYADFVKGRFTISRDNAKNSLYLQMDSLRAEDTAVYYCAWPGYRKAWGRGTLVTVSSGGGGSGGGGSGGGGSQSVLTQPASVSGSPGQSITISCAGTSSDVGGYNYVSWYQQHPGKAPKLMIYEDSKRPSGVSNRFSGSKSGNTASLTISGLRAEDEADYYCSYCASKGHWLFGGGTKLAVLGAAAEQKLISGSGSGSGSGSGSNPYLRLKVRRDHIIDDALVRLEMIAMENPADLKKQLYVEFEGEQGVDEGGVSKEFFQLVVEEIFNPDIGMFTYDESTKLFWFNPSSFETEGQFTLIGIVLGLAIYNNCILDVHFPMVVYRKLMGKKGTFRDLGDSHPVLYQSLKDLLEYEGNVEDDMMITFQISQTDLFGNPMMYDLKENGDKIPITNENRKEFVNLYSDYILNKSVEKQFKAFRRGFHMVTNESPLKYLFRPEEIELLICGSRNLDFQALEETTEYDGGYTRDSVLIREFWEIVHSFTDEQKRLFLQFTTGTDRAPVGGLGKLKMIIAKNGPDTERLPTSHTCFNVLLLPEYSSKEKLKERLLKAITYAKGFGML

SEQ ID NO: 600 - protein, 620 aa, synthetic construct
  source 1..620: note = FBXW7a-(GS)1-INT41 peptide
NQELLSVGSKRRRTGGSLRGNPSSSQVDEEQMNRVVEEEQQQQLRQQEEEHTARNGEVVGVEPRPGGQNDSQQGQLEENNNRFISVDEDSSGNQEEQEEDEEHAGEQDEEDEEEEEMDQESDDFDQSDDSSREDEHTHTNSVTNSSSIVDLPVHQLSSPFYTKTTKMKRKLDHGSEVRSFSLGKKPCKVSEYTSTTGLVPCSATPTTFGDLRAANGQGQQRRRITSVQPPTGLQEWLKMFQSWSGPEKLLALDELIDSCEPTQVKHMMQVIEPQFQRDFISLLPKELALYVLSFLEPKDLLQAAQTCRYWRILAEDNLLWREKCKEEGIDEPLHIKRRKVIKPGFIHSPWKSAYIRQHRIDTNSRRGGSAEVQLVVSGGGLVKPGGSMILSCAASGFTFSNYSMNWVRQAPGKGLEWVSSISSSSEYIYYADFVKGRFTISRDNAKNSLYLQMDSLRAEDTAVYYCAWPGYRKAWGRGTLVTVSSGGGGSGGGGSGGGGSQSVLTQPASVSGSPGQSITISCAGTSSDVGGYNYVSWYQQHPGKAPKLMIYEDSKRPSGVSNRFSGSKSGNTASLTISGLRAEDEADYYCSYCASKGHWLFGGGTKLAVLGAAAEQKLIS

SEQ ID NO: 601 - protein, 622 aa, synthetic construct
  source 1..622: note = FBXW7a-(GS)2-INT41 peptide
NQELLSVGSKRRRTGGSLRGNPSSSQVDEEQMNRVVEEEQQQQLRQQEEEHTARNGEVVGVEPRPGGQNDSQQGQLEENNNRFISVDEDSSGNQEEQEEDEEHAGEQDEEDEEEEEMDQESDDFDQSDDSSREDEHTHTNSVTNSSSIVDLPVHQLSSPFYTKTTKMKRKLDHGSEVRSFSLGKKPCKVSEYTSTTGLVPCSATPTTFGDLRAANGQGQQRRRITSVQPPTGLQEWLKMFQSWSGPEKLLALDELIDSCEPTQVKHMMQVIEPQFQRDFISLLPKELALYVLSFLEPKDLLQAAQTCRYWRILAEDNLLWREKCKEEGIDEPLHIKRRKVIKPGFIHSPWKSAYIRQHRIDTNSRRGGSGSAEVQLVVSGGGLVKPGGSMILSCAASGFTFSNYSMNWVRQAPGKGLEWVSSISSSSEYIYYADFVKGRFTISRDNAKNSLYLQMDSLRAEDTAVYYCAWPGYRKAWGRGTLVTVSSGGGGSGGGGSGGGGSQSVLTQPASVSGSPGQSITISCAGTSSDVGGYNYVSWYQQHPGKAPKLMIYEDSKRPSGVSNRFSGSKSGNTASLTISGLRAEDEADYYCSYCASKGHWLFGGGTKLAVLGAAAEQKLIS

SEQ ID NO: 602 - protein, 624 aa, synthetic construct
  source 1..624: note = FBXW7a-(GS)3-INT41 peptide
NQELLSVGSKRRRTGGSLRGNPSSSQVDEEQMNRVVEEEQQQQLRQQEEEHTARNGEVVGVEPRPGGQNDSQQGQLEENNNRFISVDEDSSGNQEEQEEDEEHAGEQDEEDEEEEEMDQESDDFDQSDDSSREDEHTHTNSVTNSSSIVDLPVHQLSSPFYTKTTKMKRKLDHGSEVRSFSLGKKPCKVSEYTSTTGLVPCSATPTTFGDLRAANGQGQQRRRITSVQPPTGLQEWLKMFQSWSGPEKLLALDELIDSCEPTQVKHMMQVIEPQFQRDFISLLPKELALYVLSFLEPKDLLQAAQTCRYWRILAEDNLLWREKCKEEGIDEPLHIKRRKVIKPGFIHSPWKSAYIRQHRIDTNSRRGGSGSGSAEVQLVVSGGGLVKPGGSMILSCAASGFTFSNYSMNWVRQAPGKGLEWVSSISSSSEYIYYADFVKGRFTISRDNAKNSLYLQMDSLRAEDTAVYYCAWPGYRKAWGRGTLVTVSSGGGGSGGGGSGGGGSQSVLTQPASVSGSPGQSITISCAGTSSDVGGYNYVSWYQQHPGKAPKLMIYEDSKRPSGVSNRFSGSKSGNTASLTISGLRAEDEADYYCSYCASKGHWLFGGGTKLAVLGAAAEQKLIS

SEQ ID NO: 603 - protein, 626 aa, synthetic construct
  source 1..626: note = FBXW7a-(GS)4-INT41 peptide
NQELLSVGSKRRRTGGSLRGNPSSSQVDEEQMNRVVEEEQQQQLRQQEEEHTARNGEVVGVEPRPGGQNDSQQGQLEENNNRFISVDEDSSGNQEEQEEDEEHAGEQDEEDEEEEEMDQESDDFDQSDDSSREDEHTHTNSVTNSSSIVDLPVHQLSSPFYTKTTKMKRKLDHGSEVRSFSLGKKPCKVSEYTSTTGLVPCSATPTTFGDLRAANGQGQQRRRITSVQPPTGLQEWLKMFQSWSGPEKLLALDELIDSCEPTQVKHMMQVIEPQFQRDFISLLPKELALYVLSFLEPKDLLQAAQTCRYWRILAEDNLLWREKCKEEGIDEPLHIKRRKVIKPGFIHSPWKSAYIRQHRIDTNSRRGGSGSGSGSAEVQLVVSGGGLVKPGGSMILSCAASGFTFSNYSMNWVRQAPGKGLEWVSSISSSSEYIYYADFVKGRFTISRDNAKNSLYLQMDSLRAEDTAVYYCAWPGYRKAWGRGTLVTVSSGGGGSGGGGSGGGGSQSVLTQPASVSGSPGQSITISCAGTSSDVGGYNYVSWYQQHPGKAPKLMIYEDSKRPSGVSNRFSGSKSGNTASLTISGLRAEDEADYYCSYCASKGHWLFGGGTKLAVLGAAAEQKLIS

SEQ ID NO: 604 - protein, 628 aa, synthetic construct
  source 1..628: note = FBXW7a-(GS)5-INT41 peptide
NQELLSVGSKRRRTGGSLRGNPSSSQVDEEQMNRVVEEEQQQQLRQQEEEHTARNGEVVGVEPRPGGQNDSQQGQLEENNNRFISVDEDSSGNQEEQEEDEEHAGEQDEEDEEEEEMDQESDDFDQSDDSSREDEHTHTNSVTNSSSIVDLPVHQLSSPFYTKTTKMKRKLDHGSEVRSFSLGKKPCKVSEYTSTTGLVPCSATPTTFGDLRAANGQGQQRRRITSVQPPTGLQEWLKMFQSWSGPEKLLALDELIDSCEPTQVKHMMQVIEPQFQRDFISLLPKELALYVLSFLEPKDLLQAAQTCRYWRILAEDNLLWREKCKEEGIDEPLHIKRRKVIKPGFIHSPWKSAYIRQHRIDTNSRRGGSGSGSGSGSAEVQLVVSGGGLVKPGGSMILSCAASGFTFSNYSMNWVRQAPGKGLEWVSSISSSSEYIYYADFVKGRFTISRDNAKNSLYLQMDSLRAEDTAVYYCAWPGYRKAWGRGTLVTVSSGGGGSGGGGSGGGGSQSVLTQPASVSGSPGQSITISCAGTSSDVGGYNYVSWYQQHPGKAPKLMIYEDSKRPSGVSNRFSGSKSGNTASLTISGLRAEDEADYYCSYCASKGHWLFGGGTKLAVLGAAAEQKLIS

SEQ ID NO: 605 - protein, 630 aa, synthetic construct
  source 1..630: note = FBXW7a-(GS)6-INT41 peptide
NQELLSVGSKRRRTGGSLRGNPSSSQVDEEQMNRVVEEEQQQQLRQQEEEHTARNGEVVGVEPRPGGQNDSQQGQLEENNNRFISVDEDSSGNQEEQEEDEEHAGEQDEEDEEEEEMDQESDDFDQSDDSSREDEHTHTNSVTNSSSIVDLPVHQLSSPFYTKTTKMKRKLDHGSEVRSFSLGKKPCKVSEYTSTTGLVPCSATPTTFGDLRAANGQGQQRRRITSVQPPTGLQEWLKMFQSWSGPEKLLALDELIDSCEPTQVKHMMQVIEPQFQRDFISLLPKELALYVLSFLEPKDLLQAAQTCRYWRILAEDNLLWREKCKEEGIDEPLHIKRRKVIKPGFIHSPWKSAYIRQHRIDTNSRRGGSGSGSGSGSGSAEVQLVVSGGGLVKPGGSMILSCAASGFTFSNYSMNWVRQAPGKGLEWVSSISSSSEYIYYADFVKGRFTISRDNAKNSLYLQMDSLRAEDTAVYYCAWPGYRKAWGRGTLVTVSSGGGGSGGGGSGGGGSQSVLTQPASVSGSPGQSITISCAGTSSDVGGYNYVSWYQQHPGKAPKLMIYEDSKRPSGVSNRFSGSKSGNTASLTISGLRAEDEADYYCSYCASKGHWLFGGGTKLAVLGAAAEQKLIS

SEQ ID NO: 606 - protein, 630 aa, synthetic construct
  source 1..630: note = HA-FBXW7a-(GS)1-INT41 peptide
MYPYDVPDYANQELLSVGSKRRRTGGSLRGNPSSSQVDEEQMNRVVEEEQQQQLRQQEEEHTARNGEVVGVEPRPGGQNDSQQGQLEENNNRFISVDEDSSGNQEEQEEDEEHAGEQDEEDEEEEEMDQESDDFDQSDDSSREDEHTHTNSVTNSSSIVDLPVHQLSSPFYTKTTKMKRKLDHGSEVRSFSLGKKPCKVSEYTSTTGLVPCSATPTTFGDLRAANGQGQQRRRITSVQPPTGLQEWLKMFQSWSGPEKLLALDELIDSCEPTQVKHMMQVIEPQFQRDFISLLPKELALYVLSFLEPKDLLQAAQTCRYWRILAEDNLLWREKCKEEGIDEPLHIKRRKVIKPGFIHSPWKSAYIRQHRIDTNSRRGGSAEVQLVVSGGGLVKPGGSMILSCAASGFTFSNYSMNWVRQAPGKGLEWVSSISSSSEYIYYADFVKGRFTISRDNAKNSLYLQMDSLRAEDTAVYYCAWPGYRKAWGRGTLVTVSSGGGGSGGGGSGGGGSQSVLTQPASVSGSPGQSITISCAGTSSDVGGYNYVSWYQQHPGKAPKLMIYEDSKRPSGVSNRFSGSKSGNTASLTISGLRAEDEADYYCSYCASKGHWLFGGGTKLAVLGAAAEQKLIS

SEQ ID NO: 607 - protein, 632 aa, synthetic construct
  source 1..632: note = HA-FBXW7a-(GS)2-INT41 peptide
MYPYDVPDYANQELLSVGSKRRRTGGSLRGNPSSSQVDEEQMNRVVEEEQQQQLRQQEEEHTARNGEVVGVEPRPGGQNDSQQGQLEENNNRFISVDEDSSGNQEEQEEDEEHAGEQDEEDEEEEEMDQESDDFDQSDDSSREDEHTHTNSVTNSSSIVDLPVHQLSSPFYTKTTKMKRKLDHGSEVRSFSLGKKPCKVSEYTSTTGLVPCSATPTTFGDLRAANGQGQQRRRITSVQPPTGLQEWLKMFQSWSGPEKLLALDELIDSCEPTQVKHMMQVIEPQFQRDFISLLPKELALYVLSFLEPKDLLQAAQTCRYWRILAEDNLLWREKCKEEGIDEPLHIKRRKVIKPGFIHSPWKSAYIRQHRIDTNSRRGGSGSAEVQLVVSGGGLVKPGGSMILSCAASGFTFSNYSMNWVRQAPGKGLEWVSSISSSSEYIYYADFVKGRFTISRDNAKNSLYLQMDSLRAEDTAVYYCAWPGYRKAWGRGTLVTVSSGGGGSGGGGSGGGGSQSVLTQPASVSGSPGQSITISCAGTSSDVGGYNYVSWYQQHPGKAPKLMIYEDSKRPSGVSNRFSGSKSGNTASLTISGLRAEDEADYYCSYCASKGHWLFGGGTKLAVLGAAAEQKLIS

SEQ ID NO: 608 - protein, 634 aa, synthetic construct
  source 1..634: note = HA-FBXW7a-(GS)3-INT41 peptide
MYPYDVPDYANQELLSVGSKRRRTGGSLRGNPSSSQVDEEQMNRVVEEEQQQQLRQQEEEHTARNGEVVGVEPRPGGQNDSQQGQLEENNNRFISVDEDSSGNQEEQEEDEEHAGEQDEEDEEEEEMDQESDDFDQSDDSSREDEHTHTNSVTNSSSIVDLPVHQLSSPFYTKTTKMKRKLDHGSEVRSFSLGKKPCKVSEYTSTTGLVPCSATPTTFGDLRAANGQGQQRRRITSVQPPTGLQEWLKMFQSWSGPEKLLALDELIDSCEPTQVKHMMQVIEPQFQRDFISLLPKELALYVLSFLEPKDLLQAAQTCRYWRILAEDNLLWREKCKEEGIDEPLHIKRRKVIKPGFIHSPWKSAYIRQHRIDTNSRRGGSGSGSAEVQLVVSGGGLVKPGGSMILSCAASGFTFSNYSMNWVRQAPGKGLEWVSSISSSSEYIYYADFVKGRFTISRDNAKNSLYLQMDSLRAEDTAVYYCAWPGYRKAWGRGTLVTVSSGGGGSGGGGSGGGGSQSVLTQPASVSGSPGQSITISCAGTSSDVGGYNYVSWYQQHPGKAPKLMIYEDSKRPSGVSNRFSGSKSGNTASLTISGLRAEDEADYYCSYCASKGHWLFGGGTKLAVLGAAAEQKLIS

SEQ ID NO: 609 - protein, 636 aa, synthetic construct
  source 1..636: note = HA-FBXW7a-(GS)4-INT41 peptide
MYPYDVPDYANQELLSVGSKRRRTGGSLRGNPSSSQVDEEQMNRVVEEEQQQQLRQQEEEHTARNGEVVGVEPRPGGQNDSQQGQLEENNNRFISVDEDSSGNQEEQEEDEEHAGEQDEEDEEEEEMDQESDDFDQSDDSSREDEHTHTNSVTNSSSIVDLPVHQLSSPFYTKTTKMKRKLDHGSEVRSFSLGKKPCKVSEYTSTTGLVPCSATPTTFGDLRAANGQGQQRRRITSVQPPTGLQEWLKMFQSWSGPEKLLALDELIDSCEPTQVKHMMQVIEPQFQRDFISLLPKELALYVLSFLEPKDLLQAAQTCRYWRILAEDNLLWREKCKEEGIDEPLHIKRRKVIKPGFIHSPWKSAYIRQHRIDTNSRRGGSGSGSGSAEVQLVVSGGGLVKPGGSMILSCAASGFTFSNYSMNWVRQAPGKGLEWVSSISSSSEYIYYADFVKGRFTISRDNAKNSLYLQMDSLRAEDTAVYYCAWPGYRKAWGRGTLVTVSSGGGGSGGGGSGGGGSQSVLTQPASVSGSPGQSITISCAGTSSDVGGYNYVSWYQQHPGKAPKLMIYEDSKRPSGVSNRFSGSKSGNTASLTISGLRAEDEADYYCSYCASKGHWLFGGGTKLAVLGAAAEQKLIS

SEQ ID NO: 610 - protein, 638 aa, synthetic construct
  source 1..638: note = HA-FBXW7a-(GS)5-INT41 peptide
MYPYDVPDYANQELLSVGSKRRRTGGSLRGNPSSSQVDEEQMNRVVEEEQQQQLRQQEEEHTARNGEVVGVEPRPGGQNDSQQGQLEENNNRFISVDEDSSGNQEEQEEDEEHAGEQDEEDEEEEEMDQESDDFDQSDDSSREDEHTHTNSVTNSSSIVDLPVHQLSSPFYTKTTKMKRKLDHGSEVRSFSLGKKPCKVSEYTSTTGLVPCSATPTTFGDLRAANGQGQQRRRITSVQPPTGLQEWLKMFQSWSGPEKLLALDELIDSCEPTQVKHMMQVIEPQFQRDFISLLPKELALYVLSFLEPKDLLQAAQTCRYWRILAEDNLLWREKCKEEGIDEPLHIKRRKVIKPGFIHSPWKSAYIRQHRIDTNSRRGGSGSGSGSGSAEVQLVVSGGGLVKPGGSMILSCAASGFTFSNYSMNWVRQAPGKGLEWVSSISSSSEYIYYADFVKGRFTISRDNAKNSLYLQMDSLRAEDTAVYYCAWPGYRKAWGRGTLVTVSSGGGGSGGGGSGGGGSQSVLTQPASVSGSPGQSITISCAGTSSDVGGYNYVSWYQQHPGKAPKLMIYEDSKRPSGVSNRFSGSKSGNTASLTISGLRAEDEADYYCSYCASKGHWLFGGGTKLAVLGAAAEQKLIS

SEQ ID NO: 611 - protein, 640 aa, synthetic construct
  source 1..640: note = HA-FBXW7a-(GS)6-INT41 peptide
MYPYDVPDYANQELLSVGSKRRRTGGSLRGNPSSSQVDEEQMNRVVEEEQQQQLRQQEEEHTARNGEVVGVEPRPGGQNDSQQGQLEENNNRFISVDEDSSGNQEEQEEDEEHAGEQDEEDEEEEEMDQESDDFDQSDDSSREDEHTHTNSVTNSSSIVDLPVHQLSSPFYTKTTKMKRKLDHGSEVRSFSLGKKPCKVSEYTSTTGLVPCSATPTTFGDLRAANGQGQQRRRITSVQPPTGLQEWLKMFQSWSGPEKLLALDELIDSCEPTQVKHMMQVIEPQFQRDFISLLPKELALYVLSFLEPKDLLQAAQTCRYWRILAEDNLLWREKCKEEGIDEPLHIKRRKVIKPGFIHSPWKSAYIRQHRIDTNSRRGGSGSGSGSGSGSAEVQLVVSGGGLVKPGGSMILSCAASGFTFSNYSMNWVRQAPGKGLEWVSSISSSSEYIYYADFVKGRFTISRDNAKNSLYLQMDSLRAEDTAVYYCAWPGYRKAWGRGTLVTVSSGGGGSGGGGSGGGGSQSVLTQPASVSGSPGQSITISCAGTSSDVGGYNYVSWYQQHPGKAPKLMIYEDSKRPSGVSNRFSGSKSGNTASLTISGLRAEDEADYYCSYCASKGHWLFGGGTKLAVLGAAAEQKLIS

SEQ ID NO: 612 - protein, 589 aa, synthetic construct
  source 1..589: note = NLS-Keap1-(GS)1-INT41 peptide
PAAKRVKLDGSGSGSQPDPRPSGAGACCRFLPLQSQCPEGAGDAVMYASTECKAEVTPSQHGNRTFSYTLEDHTKQAFGIMNELRLSQQLCDVTLQVKYQDAPAAQFMAHKVVLASSSPVFKAMFTNGLREQGMEVVSIEGIHPKVMERLIEFAYTASISMGEKCVLHVMNGAVMYQIDSVVRACSDFLVQQLDPSNAIGIANFAEQIGCVELHQRAREYIYMHFGEVAKQEEFFNLSHCQLVTLISRDDLNVRCESEVFHACINWVKYDCEQRRFYVQALLRAVRCHSLTPNFLQMQLQKCEILQSDSRCKDYLVKIFEELTLHKPTQVMPCRAPGSAEVQLVVSGGGLVKPGGSMILSCAASGFTFSNYSMNWVRQAPGKGLEWVSSISSSSEYIYYADFVKGRFTISRDNAKNSLYLQMDSLRAEDTAVYYCAWPGYRKAWGRGTLVTVSSGGGGSGGGGSGGGGSQSVLTQPASVSGSPGQSITISCAGTSSDVGGYNYVSWYQQHPGKAPKLMIYEDSKRPSGVSNRFSGSKSGNTASLTISGLRAEDEADYYCSYCASKGHWLFGGGTKLAVLGAAAEQKLIS

SEQ ID NO: 613 - protein, 591 aa, synthetic construct
  source 1..591: note = NLS-Keap1-(GS)2-INT41 peptide
PAAKRVKLDGSGSGSQPDPRPSGAGACCRFLPLQSQCPEGAGDAVMYASTECKAEVTPSQHGNRTFSYTLEDHTKQAFGIMNELRLSQQLCDVTLQVKYQDAPAAQFMAHKVVLASSSPVFKAMFTNGLREQGMEVVSIEGIHPKVMERLIEFAYTASISMGEKCVLHVMNGAVMYQIDSVVRACSDFLVQQLDPSNAIGIANFAEQIGCVELHQRAREYIYMHFGEVAKQEEFFNLSHCQLVTLISRDDLNVRCESEVFHACINWVKYDCEQRRFYVQALLRAVRCHSLTPNFLQMQLQKCEILQSDSRCKDYLVKIFEELTLHKPTQVMPCRAPGSGSAEVQLVVSGGGLVKPGGSMILSCAASGFTFSNYSMNWVRQAPGKGLEWVSSISSSSEYIYYADFVKGRFTISRDNAKNSLYLQMDSLRAEDTAVYYCAWPGYRKAWGRGTLVTVSSGGGGSGGGGSGGGGSQSVLTQPASVSGSPGQSITISCAGTSSDVGGYNYVSWYQQHPGKAPKLMIYEDSKRPSGVSNRFSGSKSGNTASLTISGLRAEDEADYYCSYCASKGHWLFGGGTKLAVLGAAAEQKLIS

SEQ ID NO: 614 - protein, 593 aa, synthetic construct
  source 1..593: note = NLS-Keap1-(GS)3-INT41 peptide
PAAKRVKLDGSGSGSQPDPRPSGAGACCRFLPLQSQCPEGAGDAVMYASTECKAEVTPSQHGNRTFSYTLEDHTKQAFGIMNELRLSQQLCDVTLQVKYQDAPAAQFMAHKVVLASSSPVFKAMFTNGLREQGMEVVSIEGIHPKVMERLIEFAYTASISMGEKCVLHVMNGAVMYQIDSVVRACSDFLVQQLDPSNAIGIANFAEQIGCVELHQRAREYIYMHFGEVAKQEEFFNLSHCQLVTLISRDDLNVRCESEVFHACINWVKYDCEQRRFYVQALLRAVRCHSLTPNFLQMQLQKCEILQSDSRCKDYLVKIFEELTLHKPTQVMPCRAPGSGSGSAEVQLVVSGGGLVKPGGSMILSCAASGFTFSNYSMNWVRQAPGKGLEWVSSISSSSEYIYYADFVKGRFTISRDNAKNSLYLQMDSLRAEDTAVYYCAWPGYRKAWGRGTLVTVSSGGGGSGGGGSGGGGSQSVLTQPASVSGSPGQSITISCAGTSSDVGGYNYVSWYQQHPGKAPKLMIYEDSKRPSGVSNRFSGSKSGNTASLTISGLRAEDEADYYCSYCASKGHWLFGGGTKLAVLGAAAEQKLIS

SEQ ID NO: 615 - protein, 595 aa, synthetic construct
  source 1..595: note = NLS-Keap1-(GS)4-INT41 peptide
PAAKRVKLDGSGSGSQPDPRPSGAGACCRFLPLQSQCPEGAGDAVMYASTECKAEVTPSQHGNRTFSYTLEDHTKQAFGIMNELRLSQQLCDVTLQVKYQDAPAAQFMAHKVVLASSSPVFKAMFTNGLREQGMEVVSIEGIHPKVMERLIEFAYTASISMGEKCVLHVMNGAVMYQIDSVVRACSDFLVQQLDPSNAIGIANFAEQIGCVELHQRAREYIYMHFGEVAKQEEFFNLSHCQLVTLISRDDLNVRCESEVFHACINWVKYDCEQRRFYVQALLRAVRCHSLTPNFLQMQLQKCEILQSDSRCKDYLVKIFEELTLHKPTQVMPCRAPGSGSGSGSAEVQLVVSGGGLVKPGGSMILSCAASGFTFSNYSMNWVRQAPGKGLEWVSSISSSSEYIYYADFVKGRFTISRDNAKNSLYLQMDSLRAEDTAVYYCAWPGYRKAWGRGTLVTVSSGGGGSGGGGSGGGGSQSVLTQPASVSGSPGQSITISCAGTSSDVGGYNYVSWYQQHPGKAPKLMIYEDSKRPSGVSNRFSGSKSGNTASLTISGLRAEDEADYYCSYCASKGHWLFGGGTKLAVLGAAAEQKLIS

SEQ ID NO: 616 - protein, 597 aa, synthetic construct
  source 1..597: note = NLS-Keap1-(GS)5-INT41 peptide
PAAKRVKLDGSGSGSQPDPRPSGAGACCRFLPLQSQCPEGAGDAVMYASTECKAEVTPSQHGNRTFSYTLEDHTKQAFGIMNELRLSQQLCDVTLQVKYQDAPAAQFMAHKVVLASSSPVFKAMFTNGLREQGMEVVSIEGIHPKVMERLIEFAYTASISMGEKCVLHVMNGAVMYQIDSVVRACSDFLVQQLDPSNAIGIANFAEQIGCVELHQRAREYIYMHFGEVAKQEEFFNLSHCQLVTLISRDDLNVRCESEVFHACINWVKYDCEQRRFYVQALLRAVRCHSLTPNFLQMQLQKCEILQSDSRCKDYLVKIFEELTLHKPTQVMPCRAPGSGSGSGSGSAEVQLVVSGGGLVKPGGSMILSCAASGFTFSNYSMNWVRQAPGKGLEWVSSISSSSEYIYYADFVKGRFTISRDNAKNSLYLQMDSLRAEDTAVYYCAWPGYRKAWGRGTLVTVSSGGGGSGGGGSGGGGSQSVLTQPASVSGSPGQSITISCAGTSSDVGGYNYVSWYQQHPGKAPKLMIYEDSKRPSGVSNRFSGSKSGNTASLTISGLRAEDEADYYCSYCASKGHWLFGGGTKLAVLGAAAEQKLIS

SEQ ID NO: 617 - protein, 599 aa, synthetic construct
  source 1..599: note = NLS-Keap1-(GS)6-INT41 peptide
PAAKRVKLDGSGSGSQPDPRPSGAGACCRFLPLQSQCPEGAGDAVMYASTECKAEVTPSQHGNRTFSYTLEDHTKQAFGIMNELRLSQQLCDVTLQVKYQDAPAAQFMAHKVVLASSSPVFKAMFTNGLREQGMEVVSIEGIHPKVMERLIEFAYTASISMGEKCVLHVMNGAVMYQIDSVVRACSDFLVQQLDPSNAIGIANFAEQIGCVELHQRAREYIYMHFGEVAKQEEFFNLSHCQLVTLISRDDLNVRCESEVFHACINWVKYDCEQRRFYVQALLRAVRCHSLTPNFLQMQLQKCEILQSDSRCKDYLVKIFEELTLHKPTQVMPCRAPGSGSGSGSGSGSAEVQLVVSGGGLVKPGGSMILSCAASGFTFSNYSMNWVRQAPGKGLEWVSSISSSSEYIYYADFVKGRFTISRDNAKNSLYLQMDSLRAEDTAVYYCAWPGYRKAWGRGTLVTVSSGGGGSGGGGSGGGGSQSVLTQPASVSGSPGQSITISCAGTSSDVGGYNYVSWYQQHPGKAPKLMIYEDSKRPSGVSNRFSGSKSGNTASLTISGLRAEDEADYYCSYCASKGHWLFGGGTKLAVLGAAAEQKLIS

SEQ ID NO: 618 - protein, 599 aa, synthetic construct
  source 1..599: note = HA-NLS-Keap1-(GS)1-INT41 peptide
MYPYDVPDYAPAAKRVKLDGSGSGSQPDPRPSGAGACCRFLPLQSQCPEGAGDAVMYASTECKAEVTPSQHGNRTFSYTLEDHTKQAFGIMNELRLSQQLCDVTLQVKYQDAPAAQFMAHKVVLASSSPVFKAMFTNGLREQGMEVVSIEGIHPKVMERLIEFAYTASISMGEKCVLHVMNGAVMYQIDSVVRACSDFLVQQLDPSNAIGIANFAEQIGCVELHQRAREYIYMHFGEVAKQEEFFNLSHCQLVTLISRDDLNVRCESEVFHACINWVKYDCEQRRFYVQALLRAVRCHSLTPNFLQMQLQKCEILQSDSRCKDYLVKIFEELTLHKPTQVMPCRAPGSAEVQLVVSGGGLVKPGGSMILSCAASGFTFSNYSMNWVRQAPGKGLEWVSSISSSSEYIYYADFVKGRFTISRDNAKNSLYLQMDSLRAEDTAVYYCAWPGYRKAWGRGTLVTVSSGGGGSGGGGSGGGGSQSVLTQPASVSGSPGQSITISCAGTSSDVGGYNYVSWYQQHPGKAPKLMIYEDSKRPSGVSNRFSGSKSGNTASLTISGLRAEDEADYYCSYCASKGHWLFGGGTKLAVLGAAAEQKLIS

SEQ ID NO: 619 - protein, 601 aa, synthetic construct
  source 1..601: note = HA-NLS-Keap1-(GS)2-INT41 peptide
MYPYDVPDYAPAAKRVKLDGSGSGSQPDPRPSGAGACCRFLPLQSQCPEGAGDAVMYASTECKAEVTPSQHGNRTFSYTLEDHTKQAFGIMNELRLSQQLCDVTLQVKYQDAPAAQFMAHKVVLASSSPVFKAMFTNGLREQGMEVVSIEGIHPKVMERLIEFAYTASISMGEKCVLHVMNGAVMYQIDSVVRACSDFLVQQLDPSNAIGIANFAEQIGCVELHQRAREYIYMHFGEVAKQEEFFNLSHCQLVTLISRDDLNVRCESEVFHACINWVKYDCEQRRFYVQALLRAVRCHSLTPNFLQMQLQKCEILQSDSRCKDYLVKIFEELTLHKPTQVMPCRAPGSGSAEVQLVVSGGGLVKPGGSMILSCAASGFTFSNYSMNWVRQAPGKGLEWVSSISSSSEYIYYADFVKGRFTISRDNAKNSLYLQMDSLRAEDTAVYYCAWPGYRKAWGRGTLVTVSSGGGGSGGGGSGGGGSQSVLTQPASVSGSPGQSITISCAGTSSDVGGYNYVSWYQQHPGKAPKLMIYEDSKRPSGVSNRFSGSKSGNTASLTISGLRAEDEADYYCSYCASKGHWLFGGGTKLAVLGAAAEQKLIS

SEQ ID NO: 620 - protein, 603 aa, synthetic construct
  source 1..603: note = HA-NLS-Keap1-(GS)3-INT41 peptide
MYPYDVPDYAPAAKRVKLDGSGSGSQPDPRPSGAGACCRFLPLQSQCPEGAGDAVMYASTECKAEVTPSQHGNRTFSYTLEDHTKQAFGIMNELRLSQQLCDVTLQVKYQDAPAAQFMAHKVVLASSSPVFKAMFTNGLREQGMEVVSIEGIHPKVMERLIEFAYTASISMGEKCVLHVMNGAVMYQIDSVVRACSDFLVQQLDPSNAIGIANFAEQIGCVELHQRAREYIYMHFGEVAKQEEFFNLSHCQLVTLISRDDLNVRCESEVFHACINWVKYDCEQRRFYVQALLRAVRCHSLTPNFLQMQLQKCEILQSDSRCKDYLVKIFEELTLHKPTQVMPCRAPGSGSGSAEVQLVVSGGGLVKPGGSMILSCAASGFTFSNYSMNWVRQAPGKGLEWVSSISSSSEYIYYADFVKGRFTISRDNAKNSLYLQMDSLRAEDTAVYYCAWPGYRKAWGRGTLVTVSSGGGGSGGGGSGGGGSQSVLTQPASVSGSPGQSITISCAGTSSDVGGYNYVSWYQQHPGKAPKLMIYEDSKRPSGVSNRFSGSKSGNTASLTISGLRAEDEADYYCSYCASKGHWLFGGGTKLAVLGAAAEQKLIS

SEQ ID NO: 621 - protein, 605 aa, synthetic construct
  source 1..605: note = HA-NLS-Keap1-(GS)4-INT41 peptide
MYPYDVPDYAPAAKRVKLDGSGSGSQPDPRPSGAGACCRFLPLQSQCPEGAGDAVMYASTECKAEVTPSQHGNRTFSYTLEDHTKQAFGIMNELRLSQQLCDVTLQVKYQDAPAAQFMAHKVVLASSSPVFKAMFTNGLREQGMEVVSIEGIHPKVMERLIEFAYTASISMGEKCVLHVMNGAVMYQIDSVVRACSDFLVQQLDPSNAIGIANFAEQIGCVELHQRAREYIYMHFGEVAKQEEFFNLSHCQLVTLISRDDLNVRCESEVFHACINWVKYDCEQRRFYVQALLRAVRCHSLTPNFLQMQLQKCEILQSDSRCKDYLVKIFEELTLHKPTQVMPCRAPGSGSGSGSAEVQLVVSGGGLVKPGGSMILSCAASGFTFSNYSMNWVRQAPGKGLEWVSSISSSSEYIYYADFVKGRFTISRDNAKNSLYLQMDSLRAEDTAVYYCAWPGYRKAWGRGTLVTVSSGGGGSGGGGSGGGGSQSVLTQPASVSGSPGQSITISCAGTSSDVGGYNYVSWYQQHPGKAPKLMIYEDSKRPSGVSNRFSGSKSGNTASLTISGLRAEDEADYYCSYCASKGHWLFGGGTKLAVLGAAAEQKLIS

SEQ ID NO: 622 - protein, 607 aa, synthetic construct
  source 1..607: note = HA-NLS-Keap1-(GS)5-INT41 peptide
MYPYDVPDYAPAAKRVKLDGSGSGSQPDPRPSGAGACCRFLPLQSQCPEGAGDAVMYASTECKAEVTPSQHGNRTFSYTLEDHTKQAFGIMNELRLSQQLCDVTLQVKYQDAPAAQFMAHKVVLASSSPVFKAMFTNGLREQGMEVVSIEGIHPKVMERLIEFAYTASISMGEKCVLHVMNGAVMYQIDSVVRACSDFLVQQLDPSNAIGIANFAEQIGCVELHQRAREYIYMHFGEVAKQEEFFNLSHCQLVTLISRDDLNVRCESEVFHACINWVKYDCEQRRFYVQALLRAVRCHSLTPNFLQMQLQKCEILQSDSRCKDYLVKIFEELTLHKPTQVMPCRAPGSGSGSGSGSAEVQLVVSGGGLVKPGGSMILSCAASGFTFSNYSMNWVRQAPGKGLEWVSSISSSSEYIYYADFVKGRFTISRDNAKNSLYLQMDSLRAEDTAVYYCAWPGYRKAWGRGTLVTVSSGGGGSGGGGSGGGGSQSVLTQPASVSGSPGQSITISCAGTSSDVGGYNYVSWYQQHPGKAPKLMIYEDSKRPSGVSNRFSGSKSGNTASLTISGLRAEDEADYYCSYCASKGHWLFGGGTKLAVLGAAAEQKLIS

SEQ ID NO: 623 - protein, 609 aa, synthetic construct
  source 1..609: note = HA-NLS-Keap1-(GS)6-INT41 peptide
MYPYDVPDYAPAAKRVKLDGSGSGSQPDPRPSGAGACCRFLPLQSQCPEGAGDAVMYASTECKAEVTPSQHGNRTFSYTLEDHTKQAFGIMNELRLSQQLCDVTLQVKYQDAPAAQFMAHKVVLASSSPVFKAMFTNGLREQGMEVVSIEGIHPKVMERLIEFAYTASISMGEKCVLHVMNGAVMYQIDSVVRACSDFLVQQLDPSNAIGIANFAEQIGCVELHQRAREYIYMHFGEVAKQEEFFNLSHCQLVTLISRDDLNVRCESEVFHACINWVKYDCEQRRFYVQALLRAVRCHSLTPNFLQMQLQKCEILQSDSRCKDYLVKIFEELTLHKPTQVMPCRAPGSGSGSGSGSGSAEVQLVVSGGGLVKPGGSMILSCAASGFTFSNYSMNWVRQAPGKGLEWVSSISSSSEYIYYADFVKGRFTISRDNAKNSLYLQMDSLRAEDTAVYYCAWPGYRKAWGRGTLVTVSSGGGGSGGGGSGGGGSQSVLTQPASVSGSPGQSITISCAGTSSDVGGYNYVSWYQQHPGKAPKLMIYEDSKRPSGVSNRFSGSKSGNTASLTISGLRAEDEADYYCSYCASKGHWLFGGGTKLAVLGAAAEQKLIS

SEQ ID NO: 624 - protein, 395 aa, synthetic construct
  source 1..395: note = NLS-RNF125-(GS)1-INT41 peptide
PAAKRVKLDGSGSGSGSVLSTDSGKSAPASATARALERRRDPELPVTSFDCAVCLEVLHQPVRTRCGHVFCRSCIATSLKNNKWTCPYCRAYLPSEGVPATDVAKRMKSEYKNCAECDTLVCLSEMRAHIRTCQKYIDKYGPGSAEVQLVVSGGGLVKPGGSMILSCAASGFTFSNYSMNWVRQAPGKGLEWVSSISSSSEYIYYADFVKGRFTISRDNAKNSLYLQMDSLRAEDTAVYYCAWPGYRKAWGRGTLVTVSSGGGGSGGGGSGGGGSQSVLTQPASVSGSPGQSITISCAGTSSDVGGYNYVSWYQQHPGKAPKLMIYEDSKRPSGVSNRFSGSKSGNTASLTISGLRAEDEADYYCSYCASKGHWLFGGGTKLAVLGAAAEQKLIS

SEQ ID NO: 625 - protein, 397 aa, synthetic construct
  source 1..397: note = NLS-RNF125-(GS)2-INT41 peptide
PAAKRVKLDGSGSGSGSVLSTDSGKSAPASATARALERRRDPELPVTSFDCAVCLEVLHQPVRTRCGHVFCRSCIATSLKNNKWTCPYCRAYLPSEGVPATDVAKRMKSEYKNCAECDTLVCLSEMRAHIRTCQKYIDKYGPGSGSAEVQLVVSGGGLVKPGGSMILSCAASGFTFSNYSMNWVRQAPGKGLEWVSSISSSSEYIYYADFVKGRFTISRDNAKNSLYLQMDSLRAEDTAVYYCAWPGYRKAWGRGTLVTVSSGGGGSGGGGSGGGGSQSVLTQPASVSGSPGQSITISCAGTSSDVGGYNYVSWYQQHPGKAPKLMIYEDSKRPSGVSNRFSGSKSGNTASLTISGLRAEDEADYYCSYCASKGHWLFGGGTKLAVLGAAAEQKLIS

SEQ ID NO: 626 - protein, 399 aa, synthetic construct
  source 1..399: note = NLS-RNF125-(GS)3-INT41 peptide
PAAKRVKLDGSGSGSGSVLSTDSGKSAPASATARALERRRDPELPVTSFDCAVCLEVLHQPVRTRCGHVFCRSCIATSLKNNKWTCPYCRAYLPSEGVPATDVAKRMKSEYKNCAECDTLVCLSEMRAHIRTCQKYIDKYGPGSGSGSAEVQLVVSGGGLVKPGGSMILSCAASGFTFSNYSMNWVRQAPGKGLEWVSSISSSSEYIYYADFVKGRFTISRDNAKNSLYLQMDSLRAEDTAVYYCAWPGYRKAWGRGTLVTVSSGGGGSGGGGSGGGGSQSVLTQPASVSGSPGQSITISCAGTSSDVGGYNYVSWYQQHPGKAPKLMIYEDSKRPSGVSNRFSGSKSGNTASLTISGLRAEDEADYYCSYCASKGHWLFGGGTKLAVLGAAAEQKLIS

SEQ ID NO: 627 - protein, 401 aa, synthetic construct
  source 1..401: note = NLS-RNF125-(GS)4-INT41 peptide
PAAKRVKLDGSGSGSGSVLSTDSGKSAPASATARALERRRDPELPVTSFDCAVCLEVLHQPVRTRCGHVFCRSCIATSLKNNKWTCPYCRAYLPSEGVPATDVAKRMKSEYKNCAECDTLVCLSEMRAHIRTCQKYIDKYGPGSGSGSGSAEVQLVVSGGGLVKPGGSMILSCAASGFTFSNYSMNWVRQAPGKGLEWVSSISSSSEYIYYADFVKGRFTISRDNAKNSLYLQMDSLRAEDTAVYYCAWPGYRKAWGRGTLVTVSSGGGGSGGGGSGGGGSQSVLTQPASVSGSPGQSITISCAGTSSDVGGYNYVSWYQQHPGKAPKLMIYEDSKRPSGVSNRFSGSKSGNTASLTISGLRAEDEADYYCSYCASKGHWLFGGGTKLAVLGAAAEQKLIS

SEQ ID NO: 628 - protein, 403 aa, synthetic construct
  source 1..403: note = NLS-RNF125-(GS)5-INT41 peptide
PAAKRVKLDGSGSGSGSVLSTDSGKSAPASATARALERRRDPELPVTSFDCAVCLEVLHQPVRTRCGHVFCRSCIATSLKNNKWTCPYCRAYLPSEGVPATDVAKRMKSEYKNCAECDTLVCLSEMRAHIRTCQKYIDKYGPGSGSGSGSGSAEVQLVVSGGGLVKPGGSMILSCAASGFTFSNYSMNWVRQAPGKGLEWVSSISSSSEYIYYADFVKGRFTISRDNAKNSLYLQMDSLRAEDTAVYYCAWPGYRKAWGRGTLVTVSSGGGGSGGGGSGGGGSQSVLTQPASVSGSPGQSITISCAGTSSDVGGYNYVSWYQQHPGKAPKLMIYEDSKRPSGVSNRFSGSKSGNTASLTISGLRAEDEADYYCSYCASKGHWLFGGGTKLAVLGAAAEQKLIS

SEQ ID NO: 629 - protein, 405 aa, synthetic construct
  source 1..405: note = NLS-RNF125-(GS)6-INT41 peptide
PAAKRVKLDGSGSGSGSVLSTDSGKSAPASATARALERRRDPELPVTSFDCAVCLEVLHQPVRTRCGHVFCRSCIATSLKNNKWTCPYCRAYLPSEGVPATDVAKRMKSEYKNCAECDTLVCLSEMRAHIRTCQKYIDKYGPGSGSGSGSGSGSAEVQLVVSGGGLVKPGGSMILSCAASGFTFSNYSMNWVRQAPGKGLEWVSSISSSSEYIYYADFVKGRFTISRDNAKNSLYLQMDSLRAEDTAVYYCAWPGYRKAWGRGTLVTVSSGGGGSGGGGSGGGGSQSVLTQPASVSGSPGQSITISCAGTSSDVGGYNYVSWYQQHPGKAPKLMIYEDSKRPSGVSNRFSGSKSGNTASLTISGLRAEDEADYYCSYCASKGHWLFGGGTKLAVLGAAAEQKLIS

SEQ ID NO: 630 - protein, 405 aa, synthetic construct
  source 1..405: note = HA-NLS-RNF125-(GS)1-INT41 peptide
MYPYDVPDYAPAAKRVKLDGSGSGSGSVLSTDSGKSAPASATARALERRRDPELPVTSFDCAVCLEVLHQPVRTRCGHVFCRSCIATSLKNNKWTCPYCRAYLPSEGVPATDVAKRMKSEYKNCAECDTLVCLSEMRAHIRTCQKYIDKYGPGSAEVQLVVSGGGLVKPGGSMILSCAASGFTFSNYSMNWVRQAPGKGLEWVSSISSSSEYIYYADFVKGRFTISRDNAKNSLYLQMDSLRAEDTAVYYCAWPGYRKAWGRGTLVTVSSGGGGSGGGGSGGGGSQSVLTQPASVSGSPGQSITISCAGTSSDVGGYNYVSWYQQHPGKAPKLMIYEDSKRPSGVSNRFSGSKSGNTASLTISGLRAEDEADYYCSYCASKGHWLFGGGTKLAVLGAAAEQKLIS

SEQ ID NO: 631 - protein, 407 aa, synthetic construct
  source 1..407: note = HA-NLS-RNF125-(GS)2-INT41 peptide
MYPYDVPDYAPAAKRVKLDGSGSGSGSVLSTDSGKSAPASATARALERRRDPELPVTSFDCAVCLEVLHQPVRTRCGHVFCRSCIATSLKNNKWTCPYCRAYLPSEGVPATDVAKRMKSEYKNCAECDTLVCLSEMRAHIRTCQKYIDKYGPGSGSAEVQLVVSGGGLVKPGGSMILSCAASGFTFSNYSMNWVRQAPGKGLEWVSSISSSSEYIYYADFVKGRFTISRDNAKNSLYLQMDSLRAEDTAVYYCAWPGYRKAWGRGTLVTVSSGGGGSGGGGSGGGGSQSVLTQPASVSGSPGQSITISCAGTSSDVGGYNYVSWYQQHPGKAPKLMIYEDSKRPSGVSNRFSGSKSGNTASLTISGLRAEDEADYYCSYCASKGHWLFGGGTKLAVLGAAAEQKLIS

SEQ ID NO: 632 - protein, 409 aa, synthetic construct
  source 1..409: note = HA-NLS-RNF125-(GS)3-INT41 peptide
MYPYDVPDYAPAAKRVKLDGSGSGSGSVLSTDSGKSAPASATARALERRRDPELPVTSFDCAVCLEVLHQPVRTRCGHVFCRSCIATSLKNNKWTCPYCRAYLPSEGVPATDVAKRMKSEYKNCAECDTLVCLSEMRAHIRTCQKYIDKYGPGSGSGSAEVQLVVSGGGLVKPGGSMILSCAASGFTFSNYSMNWVRQAPGKGLEWVSSISSSSEYIYYADFVKGRFTISRDNAKNSLYLQMDSLRAEDTAVYYCAWPGYRKAWGRGTLVTVSSGGGGSGGGGSGGGGSQSVLTQPASVSGSPGQSITISCAGTSSDVGGYNYVSWYQQHPGKAPKLMIYEDSKRPSGVSNRFSGSKSGNTASLTISGLRAEDEADYYCSYCASKGHWLFGGGTKLAVLGAAAEQKLIS

SEQ ID NO: 633 - protein, 411 aa, synthetic construct
  source 1..411: note = HA-NLS-RNF125-(GS)4-INT41 peptide
MYPYDVPDYAPAAKRVKLDGSGSGSGSVLSTDSGKSAPASATARALERRRDPELPVTSFDCAVCLEVLHQPVRTRCGHVFCRSCIATSLKNNKWTCPYCRAYLPSEGVPATDVAKRMKSEYKNCAECDTLVCLSEMRAHIRTCQKYIDKYGPGSGSGSGSAEVQLVVSGGGLVKPGGSMILSCAASGFTFSNYSMNWVRQAPGKGLEWVSSISSSSEYIYYADFVKGRFTISRDNAKNSLYLQMDSLRAEDTAVYYCAWPGYRKAWGRGTLVTVSSGGGGSGGGGSGGGGSQSVLTQPASVSGSPGQSITISCAGTSSDVGGYNYVSWYQQHPGKAPKLMIYEDSKRPSGVSNRFSGSKSGNTASLTISGLRAEDEADYYCSYCASKGHWLFGGGTKLAVLGAAAEQKLIS

SEQ ID NO: 634 - protein, 413 aa, synthetic construct
  source 1..413: note = HA-NLS-RNF125-(GS)5-INT41 peptide
MYPYDVPDYAPAAKRVKLDGSGSGSGSVLSTDSGKSAPASATARALERRRDPELPVTSFDCAVCLEVLHQPVRTRCGHVFCRSCIATSLKNNKWTCPYCRAYLPSEGVPATDVAKRMKSEYKNCAECDTLVCLSEMRAHIRTCQKYIDKYGPGSGSGSGSGSAEVQLVVSGGGLVKPGGSMILSCAASGFTFSNYSMNWVRQAPGKGLEWVSSISSSSEYIYYADFVKGRFTISRDNAKNSLYLQMDSLRAEDTAVYYCAWPGYRKAWGRGTLVTVSSGGGGSGGGGSGGGGSQSVLTQPASVSGSPGQSITISCAGTSSDVGGYNYVSWYQQHPGKAPKLMIYEDSKRPSGVSNRFSGSKSGNTASLTISGLRAEDEADYYCSYCASKGHWLFGGGTKLAVLGAAAEQKLIS

SEQ ID NO: 635 - protein, 415 aa, synthetic construct
  source 1..415: note = HA-NLS-RNF125-(GS)6-INT41 peptide
MYPYDVPDYAPAAKRVKLDGSGSGSGSVLSTDSGKSAPASATARALERRRDPELPVTSFDCAVCLEVLHQPVRTRCGHVFCRSCIATSLKNNKWTCPYCRAYLPSEGVPATDVAKRMKSEYKNCAECDTLVCLSEMRAHIRTCQKYIDKYGPGSGSGSGSGSGSAEVQLVVSGGGLVKPGGSMILSCAASGFTFSNYSMNWVRQAPGKGLEWVSSISSSSEYIYYADFVKGRFTISRDNAKNSLYLQMDSLRAEDTAVYYCAWPGYRKAWGRGTLVTVSSGGGGSGGGGSGGGGSQSVLTQPASVSGSPGQSITISCAGTSSDVGGYNYVSWYQQHPGKAPKLMIYEDSKRPSGVSNRFSGSKSGNTASLTISGLRAEDEADYYCSYCASKGHWLFGGGTKLAVLGAAAEQKLIS

SEQ ID NO: 636 - protein, 495 aa, synthetic construct
  source 1..495: note = INT41-(GS)1-SPOP-NLS peptide
MAEVQLVVSGGGLVKPGGSMILSCAASGFTFSNYSMNWVRQAPGKGLEWVSSISSSSEYIYYADFVKGRFTISRDNAKNSLYLQMDSLRAEDTAVYYCAWPGYRKAWGRGTLVTVSSGGGGSGGGGSGGGGSQSVLTQPASVSGSPGQSITISCAGTSSDVGGYNYVSWYQQHPGKAPKLMIYEDSKRPSGVSNRFSGSKSGNTASLTISGLRAEDEADYYCSYCASKGHWLFGGGTKLAVLGAAAEQKLISGSNGLLPDDKLTLFCEVSVVQDSVNISGQNTMNMVKVPECRLADELGGLWENSRFTDCCLCVAGQEFQAHKAILAARSPVFSAMFEHEMEESKKNRVEINDVEPEVFKEMMCFIYTGKAPNLDKMADDLLAAADKYALERLKVMCEDALCSNLSVENAAEILILADLHSADQLKTQAVDFINYHASDVLETSGWKSMVVSHPHLVAEAYRSLASAQCPFLGPPRKRLKQSGSGSPAAKRVKLD

SEQ ID NO: 637 - protein, 497 aa, synthetic construct
  source 1..497: note = INT41-(GS)2-SPOP-NLS peptide
MAEVQLVVSGGGLVKPGGSMILSCAASGFTFSNYSMNWVRQAPGKGLEWVSSISSSSEYIYYADFVKGRFTISRDNAKNSLYLQMDSLRAEDTAVYYCAWPGYRKAWGRGTLVTVSSGGGGSGGGGSGGGGSQSVLTQPASVSGSPGQSITISCAGTSSDVGGYNYVSWYQQHPGKAPKLMIYEDSKRPSGVSNRFSGSKSGNTASLTISGLRAEDEADYYCSYCASKGHWLFGGGTKLAVLGAAAEQKLISGSGSNGLLPDDKLTLFCEVSVVQDSVNISGQNTMNMVKVPECRLADELGGLWENSRFTDCCLCVAGQEFQAHKAILAARSPVFSAMFEHEMEESKKNRVEINDVEPEVFKEMMCFIYTGKAPNLDKMADDLLAAADKYALERLKVMCEDALCSNLSVENAAEILILADLHSADQLKTQAVDFINYHASDVLETSGWKSMVVSHPHLVAEAYRSLASAQCPFLGPPRKRLKQSGSGSPAAKRVKLD

SEQ ID NO: 638 - protein, 499 aa, synthetic construct
  source 1..499: note = INT41-(GS)3-SPOP-NLS peptide
MAEVQLVVSGGGLVKPGGSMILSCAASGFTFSNYSMNWVRQAPGKGLEWVSSISSSSEYIYYADFVKGRFTISRDNAKNSLYLQMDSLRAEDTAVYYCAWPGYRKAWGRGTLVTVSSGGGGSGGGGSGGGGSQSVLTQPASVSGSPGQSITISCAGTSSDVGGYNYVSWYQQHPGKAPKLMIYEDSKRPSGVSNRFSGSKSGNTASLTISGLRAEDEADYYCSYCASKGHWLFGGGTKLAVLGAAAEQKLISGSGSGSNGLLPDDKLTLFCEVSVVQDSVNISGQNTMNMVKVPECRLADELGGLWENSRFTDCCLCVAGQEFQAHKAILAARSPVFSAMFEHEMEESKKNRVEINDVEPEVFKEMMCFIYTGKAPNLDKMADDLLAAADKYALERLKVMCEDALCSNLSVENAAEILILADLHSADQLKTQAVDFINYHASDVLETSGWKSMVVSHPHLVAEAYRSLASAQCPFLGPPRKRLKQSGSGSPAAKRVKLD

SEQ ID NO: 639 - protein, 501 aa, synthetic construct
  source 1..501: note = INT41-(GS)4-SPOP-NLS peptide
MAEVQLVVSGGGLVKPGGSMILSCAASGFTFSNYSMNWVRQAPGKGLEWVSSISSSSEYIYYADFVKGRFTISRDNAKNSLYLQMDSLRAEDTAVYYCAWPGYRKAWGRGTLVTVSSGGGGSGGGGSGGGGSQSVLTQPASVSGSPGQSITISCAGTSSDVGGYNYVSWYQQHPGKAPKLMIYEDSKRPSGVSNRFSGSKSGNTASLTISGLRAEDEADYYCSYCASKGHWLFGGGTKLAVLGAAAEQKLISGSGSGSGSNGLLPDDKLTLFCEVSVVQDSVNISGQNTMNMVKVPECRLADELGGLWENSRFTDCCLCVAGQEFQAHKAILAARSPVFSAMFEHEMEESKKNRVEINDVEPEVFKEMMCFIYTGKAPNLDKMADDLLAAADKYALERLKVMCEDALCSNLSVENAAEILILADLHSADQLKTQAVDFINYHASDVLETSGWKSMVVSHPHLVAEAYRSLASAQCPFLGPPRKRLKQSGSGSPAAKRVKLD

SEQ ID NO: 640 - protein, 504 aa, synthetic construct
  source 1..504: note = INT41-(GS)5-SPOP-NLS peptide
MAEVQLVVSGGGLVKPGGSMILSCAASGFTFSNYSMNWVRQAPGKGLEWVSSISSSSEYIYYADFVKGRFTISRDNAKNSLYLQMDSLRAEDTAVYYCAWPGYRKAWGRGTLVTVSSGGGGSGGGGSGGGGSQSVLTQPASVSGSPGQSITISCAGTSSDVGGYNYVSWYQQHPGKAPKLMIYEDSKRPSGVSNRFSGSKSGNTASLTISGLRAEDEADYYCSYCASKGHWLFGGGTKLAVLGAAAEQKLISGSGSGSGSGSNGLLPDDKLTLFCEVSVVQDSVNISGQNTMNMVKVPECRLADELGGLWENSRFTDCCLCVAGQEFQAHKAILAARSPVFSAMFEHEMEESKKNRVEINDVEPEVFKEMMCFIYTGKAPNLDKMADDLLAAADKYALERLKVMCEDALCSNLSVENAAEILILADLHSADQLKTQAVDFINYHASDVLETSGWKSMVVSHPHLVAEAYRSLASAQCPFLGPPRKRLKQSGSGSPAAKRVKLDA

SEQ ID NO: 641 - protein, 505 aa, synthetic construct
  source 1..505: note = INT41-(GS)6-SPOP-NLS peptide
MAEVQLVVSGGGLVKPGGSMILSCAASGFTFSNYSMNWVRQAPGKGLEWVSSISSSSEYIYYADFVKGRFTISRDNAKNSLYLQMDSLRAEDTAVYYCAWPGYRKAWGRGTLVTVSSGGGGSGGGGSGGGGSQSVLTQPASVSGSPGQSITISCAGTSSDVGGYNYVSWYQQHPGKAPKLMIYEDSKRPSGVSNRFSGSKSGNTASLTISGLRAEDEADYYCSYCASKGHWLFGGGTKLAVLGAAAEQKLISGSGSGSGSGSGSNGLLPDDKLTLFCEVSVVQDSVNISGQNTMNMVKVPECRLADELGGLWENSRFTDCCLCVAGQEFQAHKAILAARSPVFSAMFEHEMEESKKNRVEINDVEPEVFKEMMCFIYTGKAPNLDKMADDLLAAADKYALERLKVMCEDALCSNLSVENAAEILILADLHSADQLKTQAVDFINYHASDVLETSGWKSMVVSHPHLVAEAYRSLASAQCPFLGPPRKRLKQSGSGSPAAKRVKLD

SEQ ID NO: 642 - protein, 504 aa, synthetic construct
  source 1..504: note = INT41-(GS)1-SPOP-NLS-HA peptide
MAEVQLVVSGGGLVKPGGSMILSCAASGFTFSNYSMNWVRQAPGKGLEWVSSISSSSEYIYYADFVKGRFTISRDNAKNSLYLQMDSLRAEDTAVYYCAWPGYRKAWGRGTLVTVSSGGGGSGGGGSGGGGSQSVLTQPASVSGSPGQSITISCAGTSSDVGGYNYVSWYQQHPGKAPKLMIYEDSKRPSGVSNRFSGSKSGNTASLTISGLRAEDEADYYCSYCASKGHWLFGGGTKLAVLGAAAEQKLISGSNGLLPDDKLTLFCEVSVVQDSVNISGQNTMNMVKVPECRLADELGGLWENSRFTDCCLCVAGQEFQAHKAILAARSPVFSAMFEHEMEESKKNRVEINDVEPEVFKEMMCFIYTGKAPNLDKMADDLLAAADKYALERLKVMCEDALCSNLSVENAAEILILADLHSADQLKTQAVDFINYHASDVLETSGWKSMVVSHPHLVAEAYRSLASAQCPFLGPPRKRLKQSGSGSPAAKRVKLDYPYDVPDYA

SEQ ID NO: 643 - protein, 506 aa, synthetic construct
  source 1..506: note = INT41-(GS)2-SPOP-NLS-HA peptide
MAEVQLVVSGGGLVKPGGSMILSCAASGFTFSNYSMNWVRQAPGKGLEWVSSISSSSEYIYYADFVKGRFTISRDNAKNSLYLQMDSLRAEDTAVYYCAWPGYRKAWGRGTLVTVSSGGGGSGGGGSGGGGSQSVLTQPASVSGSPGQSITISCAGTSSDVGGYNYVSWYQQHPGKAPKLMIYEDSKRPSGVSNRFSGSKSGNTASLTISGLRAEDEADYYCSYCASKGHWLFGGGTKLAVLGAAAEQKLISGSGSNGLLPDDKLTLFCEVSVVQDSVNISGQNTMNMVKVPECRLADELGGLWENSRFTDCCLCVAGQEFQAHKAILAARSPVFSAMFEHEMEESKKNRVEINDVEPEVFKEMMCFIYTGKAPNLDKMADDLLAAADKYALERLKVMCEDALCSNLSVENAAEILILADLHSADQLKTQAVDFINYHASDVLETSGWKSMVVSHPHLVAEAYRSLASAQCPFLGPPRKRLKQSGSGSPAAKRVKLDYPYDVPDYA

SEQ ID NO: 644 - protein, 508 aa, synthetic construct
  source 1..508: note = INT41-(GS)3-SPOP-NLS-HA peptide
MAEVQLVVSGGGLVKPGGSMILSCAASGFTFSNYSMNWVRQAPGKGLEWVSSISSSSEYIYYADFVKGRFTISRDNAKNSLYLQMDSLRAEDTAVYYCAWPGYRKAWGRGTLVTVSSGGGGSGGGGSGGGGSQSVLTQPASVSGSPGQSITISCAGTSSDVGGYNYVSWYQQHPGKAPKLMIYEDSKRPSGVSNRFSGSKSGNTASLTISGLRAEDEADYYCSYCASKGHWLFGGGTKLAVLGAAAEQKLISGSGSGSNGLLPDDKLTLFCEVSVVQDSVNISGQNTMNMVKVPECRLADELGGLWENSRFTDCCLCVAGQEFQAHKAILAARSPVFSAMFEHEMEESKKNRVEINDVEPEVFKEMMCFIYTGKAPNLDKMADDLLAAADKYALERLKVMCEDALCSNLSVENAAEILILADLHSADQLKTQAVDFINYHASDVLETSGWKSMVVSHPHLVAEAYRSLASAQCPFLGPPRKRLKQSGSGSPAAKRVKLDYPYDVPDYA

SEQ ID NO: 645 - protein, 510 aa, synthetic construct
  source 1..510: note = INT41-(GS)4-SPOP-NLS-HA peptide
MAEVQLVVSGGGLVKPGGSMILSCAASGFTFSNYSMNWVRQAPGKGLEWVSSISSSSEYIYYADFVKGRFTISRDNAKNSLYLQMDSLRAEDTAVYYCAWPGYRKAWGRGTLVTVSSGGGGSGGGGSGGGGSQSVLTQPASVSGSPGQSITISCAGTSSDVGGYNYVSWYQQHPGKAPKLMIYEDSKRPSGVSNRFSGSKSGNTASLTISGLRAEDEADYYCSYCASKGHWLFGGGTKLAVLGAAAEQKLISGSGSGSGSNGLLPDDKLTLFCEVSVVQDSVNISGQNTMNMVKVPECRLADELGGLWENSRFTDCCLCVAGQEFQAHKAILAARSPVFSAMFEHEMEESKKNRVEINDVEPEVFKEMMCFIYTGKAPNLDKMADDLLAAADKYALERLKVMCEDALCSNLSVENAAEILILADLHSADQLKTQAVDFINYHASDVLETSGWKSMVVSHPHLVAEAYRSLASAQCPFLGPPRKRLKQSGSGSPAAKRVKLDYPYDVPDYA

SEQ ID NO: 646 - protein, 513 aa, synthetic construct
  source 1..513: note = INT41-(GS)5-SPOP-NLS-HA peptide
MAEVQLVVSGGGLVKPGGSMILSCAASGFTFSNYSMNWVRQAPGKGLEWVSSISSSSEYIYYADFVKGRFTISRDNAKNSLYLQMDSLRAEDTAVYYCAWPGYRKAWGRGTLVTVSSGGGGSGGGGSGGGGSQSVLTQPASVSGSPGQSITISCAGTSSDVGGYNYVSWYQQHPGKAPKLMIYEDSKRPSGVSNRFSGSKSGNTASLTISGLRAEDEADYYCSYCASKGHWLFGGGTKLAVLGAAAEQKLISGSGSGSGSGSNGLLPDDKLTLFCEVSVVQDSVNISGQNTMNMVKVPECRLADELGGLWENSRFTDCCLCVAGQEFQAHKAILAARSPVFSAMFEHEMEESKKNRVEINDVEPEVFKEMMCFIYTGKAPNLDKMADDLLAAADKYALERLKVMCEDALCSNLSVENAAEILILADLHSADQLKTQAVDFINYHASDVLETSGWKSMVVSHPHLVAEAYRSLASAQCPFLGPPRKRLKQSGSGSPAAKRVKLDYPYDVPDYAA

SEQ ID NO: 647 - protein, 514 aa, synthetic construct
  source 1..514: note = INT41-(GS)6-SPOP-NLS-HA peptide
MAEVQLVVSGGGLVKPGGSMILSCAASGFTFSNYSMNWVRQAPGKGLEWVSSISSSSEYIYYADFVKGRFTISRDNAKNSLYLQMDSLRAEDTAVYYCAWPGYRKAWGRGTLVTVSSGGGGSGGGGSGGGGSQSVLTQPASVSGSPGQSITISCAGTSSDVGGYNYVSWYQQHPGKAPKLMIYEDSKRPSGVSNRFSGSKSGNTASLTISGLRAEDEADYYCSYCASKGHWLFGGGTKLAVLGAAAEQKLISGSGSGSGSGSGSNGLLPDDKLTLFCEVSVVQDSVNISGQNTMNMVKVPECRLADELGGLWENSRFTDCCLCVAGQEFQAHKAILAARSPVFSAMFEHEMEESKKNRVEINDVEPEVFKEMMCFIYTGKAPNLDKMADDLLAAADKYALERLKVMCEDALCSNLSVENAAEILILADLHSADQLKTQAVDFINYHASDVLETSGWKSMVVSHPHLVAEAYRSLASAQCPFLGPPRKRLKQSGSGSPAAKRVKLDYPYDVPDYA

SEQ ID NO: 648 - protein, 434 aa, synthetic construct
  source 1..434: note = INT41-(GS)1-CHIP peptide
MAEVQLVVSGGGLVKPGGSMILSCAASGFTFSNYSMNWVRQAPGKGLEWVSSISSSSEYIYYADFVKGRFTISRDNAKNSLYLQMDSLRAEDTAVYYCAWPGYRKAWGRGTLVTVSSGGGGSGGGGSGGGGSQSVLTQPASVSGSPGQSITISCAGTSSDVGGYNYVSWYQQHPGKAPKLMIYEDSKRPSGVSNRFSGSKSGNTASLTISGLRAEDEADYYCSYCASKGHWLFGGGTKLAVLGAAAEQKLISGSRLNFGDDIPSALRIAKKKRWNSIEERRIHQESELHSYLSRLIAAERERELEECQRNHEGDEDDSHVRAQQACIEAKHDKYMADMDELFSQVDEKRKKRDIPDYLCGKISFELMREPCITPSGITYDRKDIEEHLQRVGHFDPVTRSPLTQEQLIPNLAMKEVIDAFISENGWVEDYGSGS

SEQ ID NO: 649 - protein, 436 aa, synthetic construct
  source 1..436: note = INT41-(GS)2-CHIP peptide
MAEVQLVVSGGGLVKPGGSMILSCAASGFTFSNYSMNWVRQAPGKGLEWVSSISSSSEYIYYADFVKGRFTISRDNAKNSLYLQMDSLRAEDTAVYYCAWPGYRKAWGRGTLVTVSSGGGGSGGGGSGGGGSQSVLTQPASVSGSPGQSITISCAGTSSDVGGYNYVSWYQQHPGKAPKLMIYEDSKRPSGVSNRFSGSKSGNTASLTISGLRAEDEADYYCSYCASKGHWLFGGGTKLAVLGAAAEQKLISGSGSRLNFGDDIPSALRIAKKKRWNSIEERRIHQESELHSYLSRLIAAERERELEECQRNHEGDEDDSHVRAQQACIEAKHDKYMADMDELFSQVDEKRKKRDIPDYLCGKISFELMREPCITPSGITYDRKDIEEHLQRVGHFDPVTRSPLTQEQLIPNLAMKEVIDAFISENGWVEDYGSGS

SEQ ID NO: 650 - protein, 438 aa, synthetic construct
  source 1..438: note = INT41-(GS)3-CHIP peptide
MAEVQLVVSGGGLVKPGGSMILSCAASGFTFSNYSMNWVRQAPGKGLEWVSSISSSSEYIYYADFVKGRFTISRDNAKNSLYLQMDSLRAEDTAVYYCAWPGYRKAWGRGTLVTVSSGGGGSGGGGSGGGGSQSVLTQPASVSGSPGQSITISCAGTSSDVGGYNYVSWYQQHPGKAPKLMIYEDSKRPSGVSNRFSGSKSGNTASLTISGLRAEDEADYYCSYCASKGHWLFGGGTKLAVLGAAAEQKLISGSGSGSRLNFGDDIPSALRIAKKKRWNSIEERRIHQESELHSYLSRLIAAERERELEECQRNHEGDEDDSHVRAQQACIEAKHDKYMADMDELFSQVDEKRKKRDIPDYLCGKISFELMREPCITPSGITYDRKDIEEHLQRVGHFDPVTRSPLTQEQLIPNLAMKEVIDAFISENGWVEDYGSGS

SEQ ID NO: 651 - protein, 440 aa, synthetic construct
  source 1..440: note = INT41-(GS)4-CHIP peptide
MAEVQLVVSGGGLVKPGGSMILSCAASGFTFSNYSMNWVRQAPGKGLEWVSSISSSSEYIYYADFVKGRFTISRDNAKNSLYLQMDSLRAEDTAVYYCAWPGYRKAWGRGTLVTVSSGGGGSGGGGSGGGGSQSVLTQPASVSGSPGQSITISCAGTSSDVGGYNYVSWYQQHPGKAPKLMIYEDSKRPSGVSNRFSGSKSGNTASLTISGLRAEDEADYYCSYCASKGHWLFGGGTKLAVLGAAAEQKLISGSGSGSGSRLNFGDDIPSALRIAKKKRWNSIEERRIHQESELHSYLSRLIAAERERELEECQRNHEGDEDDSHVRAQQACIEAKHDKYMADMDELFSQVDEKRKKRDIPDYLCGKISFELMREPCITPSGITYDRKDIEEHLQRVGHFDPVTRSPLTQEQLIPNLAMKEVIDAFISENGWVEDYGSGS

SEQ ID NO: 652 - protein, 442 aa, synthetic construct
  source 1..442: note = INT41-(GS)5-CHIP peptide
MAEVQLVVSGGGLVKPGGSMILSCAASGFTFSNYSMNWVRQAPGKGLEWVSSISSSSEYIYYADFVKGRFTISRDNAKNSLYLQMDSLRAEDTAVYYCAWPGYRKAWGRGTLVTVSSGGGGSGGGGSGGGGSQSVLTQPASVSGSPGQSITISCAGTSSDVGGYNYVSWYQQHPGKAPKLMIYEDSKRPSGVSNRFSGSKSGNTASLTISGLRAEDEADYYCSYCASKGHWLFGGGTKLAVLGAAAEQKLISGSGSGSGSGSRLNFGDDIPSALRIAKKKRWNSIEERRIHQESELHSYLSRLIAAERERELEECQRNHEGDEDDSHVRAQQACIEAKHDKYMADMDELFSQVDEKRKKRDIPDYLCGKISFELMREPCITPSGITYDRKDIEEHLQRVGHFDPVTRSPLTQEQLIPNLAMKEVIDAFISENGWVEDYGSGS

SEQ ID NO: 653 - protein, 444 aa, synthetic construct
  source 1..444: note = INT41-(GS)6-CHIP peptide
MAEVQLVVSGGGLVKPGGSMILSCAASGFTFSNYSMNWVRQAPGKGLEWVSSISSSSEYIYYADFVKGRFTISRDNAKNSLYLQMDSLRAEDTAVYYCAWPGYRKAWGRGTLVTVSSGGGGSGGGGSGGGGSQSVLTQPASVSGSPGQSITISCAGTSSDVGGYNYVSWYQQHPGKAPKLMIYEDSKRPSGVSNRFSGSKSGNTASLTISGLRAEDEADYYCSYCASKGHWLFGGGTKLAVLGAAAEQKLISGSGSGSGSGSGSRLNFGDDIPSALRIAKKKRWNSIEERRIHQESELHSYLSRLIAAERERELEECQRNHEGDEDDSHVRAQQACIEAKHDKYMADMDELFSQVDEKRKKRDIPDYLCGKISFELMREPCITPSGITYDRKDIEEHLQRVGHFDPVTRSPLTQEQLIPNLAMKEVIDAFISENGWVEDYGSGS

SEQ ID NO: 654 - protein, 443 aa, synthetic construct
  source 1..443: note = INT41-(GS)1-CHIP-HA peptide
MAEVQLVVSGGGLVKPGGSMILSCAASGFTFSNYSMNWVRQAPGKGLEWVSSISSSSEYIYYADFVKGRFTISRDNAKNSLYLQMDSLRAEDTAVYYCAWPGYRKAWGRGTLVTVSSGGGGSGGGGSGGGGSQSVLTQPASVSGSPGQSITISCAGTSSDVGGYNYVSWYQQHPGKAPKLMIYEDSKRPSGVSNRFSGSKSGNTASLTISGLRAEDEADYYCSYCASKGHWLFGGGTKLAVLGAAAEQKLISGSRLNFGDDIPSALRIAKKKRWNSIEERRIHQESELHSYLSRLIAAERERELEECQRNHEGDEDDSHVRAQQACIEAKHDKYMADMDELFSQVDEKRKKRDIPDYLCGKISFELMREPCITPSGITYDRKDIEEHLQRVGHFDPVTRSPLTQEQLIPNLAMKEVIDAFISENGWVEDYGSGSYPYDVPDYA

SEQ ID NO: 655 - protein, 445 aa, synthetic construct
  source 1..445: note = INT41-(GS)2-CHIP-HA peptide
MAEVQLVVSGGGLVKPGGSMILSCAASGFTFSNYSMNWVRQAPGKGLEWVSSISSSSEYIYYADFVKGRFTISRDNAKNSLYLQMDSLRAEDTAVYYCAWPGYRKAWGRGTLVTVSSGGGGSGGGGSGGGGSQSVLTQPASVSGSPGQSITISCAGTSSDVGGYNYVSWYQQHPGKAPKLMIYEDSKRPSGVSNRFSGSKSGNTASLTISGLRAEDEADYYCSYCASKGHWLFGGGTKLAVLGAAAEQKLISGSGSRLNFGDDIPSALRIAKKKRWNSIEERRIHQESELHSYLSRLIAAERERELEECQRNHEGDEDDSHVRAQQACIEAKHDKYMADMDELFSQVDEKRKKRDIPDYLCGKISFELMREPCITPSGITYDRKDIEEHLQRVGHFDPVTRSPLTQEQLIPNLAMKEVIDAFISENGWVEDYGSGSYPYDVPDYA

SEQ ID NO: 656 - protein, 447 aa, synthetic construct
  source 1..447: note = INT41-(GS)3-CHIP-HA peptide
MAEVQLVVSGGGLVKPGGSMILSCAASGFTFSNYSMNWVRQAPGKGLEWVSSISSSSEYIYYADFVKGRFTISRDNAKNSLYLQMDSLRAEDTAVYYCAWPGYRKAWGRGTLVTVSSGGGGSGGGGSGGGGSQSVLTQPASVSGSPGQSITISCAGTSSDVGGYNYVSWYQQHPGKAPKLMIYEDSKRPSGVSNRFSGSKSGNTASLTISGLRAEDEADYYCSYCASKGHWLFGGGTKLAVLGAAAEQKLISGSGSGSRLNFGDDIPSALRIAKKKRWNSIEERRIHQESELHSYLSRLIAAERERELEECQRNHEGDEDDSHVRAQQACIEAKHDKYMADMDELFSQVDEKRKKRDIPDYLCGKISFELMREPCITPSGITYDRKDIEEHLQRVGHFDPVTRSPLTQEQLIPNLAMKEVIDAFISENGWVEDYGSGSYPYDVPDYA

SEQ ID NO: 657 - protein, 449 aa, synthetic construct
  source 1..449: note = INT41-(GS)4-CHIP-HA peptide
MAEVQLVVSGGGLVKPGGSMILSCAASGFTFSNYSMNWVRQAPGKGLEWVSSISSSSEYIYYADFVKGRFTISRDNAKNSLYLQMDSLRAEDTAVYYCAWPGYRKAWGRGTLVTVSSGGGGSGGGGSGGGGSQSVLTQPASVSGSPGQSITISCAGTSSDVGGYNYVSWYQQHPGKAPKLMIYEDSKRPSGVSNRFSGSKSGNTASLTISGLRAEDEADYYCSYCASKGHWLFGGGTKLAVLGAAAEQKLISGSGSGSGSRLNFGDDIPSALRIAKKKRWNSIEERRIHQESELHSYLSRLIAAERERELEECQRNHEGDEDDSHVRAQQACIEAKHDKYMADMDELFSQVDEKRKKRDIPDYLCGKISFELMREPCITPSGITYDRKDIEEHLQRVGHFDPVTRSPLTQEQLIPNLAMKEVIDAFISENGWVEDYGSGSYPYDVPDYA

SEQ ID NO: 658 - protein, 451 aa, synthetic construct
  source 1..451: note = INT41-(GS)5-CHIP-HA peptide
MAEVQLVVSGGGLVKPGGSMILSCAASGFTFSNYSMNWVRQAPGKGLEWVSSISSSSEYIYYADFVKGRFTISRDNAKNSLYLQMDSLRAEDTAVYYCAWPGYRKAWGRGTLVTVSSGGGGSGGGGSGGGGSQSVLTQPASVSGSPGQSITISCAGTSSDVGGYNYVSWYQQHPGKAPKLMIYEDSKRPSGVSNRFSGSKSGNTASLTISGLRAEDEADYYCSYCASKGHWLFGGGTKLAVLGAAAEQKLISGSGSGSGSGSRLNFGDDIPSALRIAKKKRWNSIEERRIHQESELHSYLSRLIAAERERELEECQRNHEGDEDDSHVRAQQACIEAKHDKYMADMDELFSQVDEKRKKRDIPDYLCGKISFELMREPCITPSGITYDRKDIEEHLQRVGHFDPVTRSPLTQEQLIPNLAMKEVIDAFISENGWVEDYGSGSYPYDVPDYA

SEQ ID NO: 659 - protein, 453 aa, synthetic construct
  source 1..453: note = INT41-(GS)6-CHIP-HA peptide
MAEVQLVVSGGGLVKPGGSMILSCAASGFTFSNYSMNWVRQAPGKGLEWVSSISSSSEYIYYADFVKGRFTISRDNAKNSLYLQMDSLRAEDTAVYYCAWPGYRKAWGRGTLVTVSSGGGGSGGGGSGGGGSQSVLTQPASVSGSPGQSITISCAGTSSDVGGYNYVSWYQQHPGKAPKLMIYEDSKRPSGVSNRFSGSKSGNTASLTISGLRAEDEADYYCSYCASKGHWLFGGGTKLAVLGAAAEQKLISGSGSGSGSGSGSRLNFGDDIPSALRIAKKKRWNSIEERRIHQESELHSYLSRLIAAERERELEECQRNHEGDEDDSHVRAQQACIEAKHDKYMADMDELFSQVDEKRKKRDIPDYLCGKISFELMREPCITPSGITYDRKDIEEHLQRVGHFDPVTRSPLTQEQLIPNLAMKEVIDAFISENGWVEDYGSGSYPYDVPDYA

SEQ ID NO: 660 - protein, 288 aa, synthetic construct
  source 1..288: note = DCAF1-(GS)1-INT41 peptide
QAPINFTSRLNRRASFPKYGGVDGGCFDRHLIFSRGSAEVQLVVSGGGLVKPGGSMILSCAASGFTFSNYSMNWVRQAPGKGLEWVSSISSSSEYIYYADFVKGRFTISRDNAKNSLYLQMDSLRAEDTAVYYCAWPGYRKAWGRGTLVTVSSGGGGSGGGGSGGGGSQSVLTQPASVSGSPGQSITISCAGTSSDVGGYNYVSWYQQHPGKAPKLMIYEDSKRPSGVSNRFSGSKSGNTASLTISGLRAEDEADYYCSYCASKGHWLFGGGTKLAVLGAAAEQKLIS

SEQ ID NO: 661 - protein, 290 aa, synthetic construct
  source 1..290: note = DCAF1-(GS)2-INT41 peptide
QAPINFTSRLNRRASFPKYGGVDGGCFDRHLIFSRGSGSAEVQLVVSGGGLVKPGGSMILSCAASGFTFSNYSMNWVRQAPGKGLEWVSSISSSSEYIYYADFVKGRFTISRDNAKNSLYLQMDSLRAEDTAVYYCAWPGYRKAWGRGTLVTVSSGGGGSGGGGSGGGGSQSVLTQPASVSGSPGQSITISCAGTSSDVGGYNYVSWYQQHPGKAPKLMIYEDSKRPSGVSNRFSGSKSGNTASLTISGLRAEDEADYYCSYCASKGHWLFGGGTKLAVLGAAAEQKLIS

SEQ ID NO: 662 - protein, 292 aa, synthetic construct
  source 1..292: note = DCAF1-(GS)3-INT41 peptide
QAPINFTSRLNRRASFPKYGGVDGGCFDRHLIFSRGSGSGSAEVQLVVSGGGLVKPGGSMILSCAASGFTFSNYSMNWVRQAPGKGLEWVSSISSSSEYIYYADFVKGRFTISRDNAKNSLYLQMDSLRAEDTAVYYCAWPGYRKAWGRGTLVTVSSGGGGSGGGGSGGGGSQSVLTQPASVSGSPGQSITISCAGTSSDVGGYNYVSWYQQHPGKAPKLMIYEDSKRPSGVSNRFSGSKSGNTASLTISGLRAEDEADYYCSYCASKGHWLFGGGTKLAVLGAAAEQKLIS

SEQ ID NO: 663 - protein, 294 aa, synthetic construct
  source 1..294: note = DCAF1-(GS)4-INT41 peptide
QAPINFTSRLNRRASFPKYGGVDGGCFDRHLIFSRGSGSGSGSAEVQLVVSGGGLVKPGGSMILSCAASGFTFSNYSMNWVRQAPGKGLEWVSSISSSSEYIYYADFVKGRFTISRDNAKNSLYLQMDSLRAEDTAVYYCAWPGYRKAWGRGTLVTVSSGGGGSGGGGSGGGGSQSVLTQPASVSGSPGQSITISCAGTSSDVGGYNYVSWYQQHPGKAPKLMIYEDSKRPSGVSNRFSGSKSGNTASLTISGLRAEDEADYYCSYCASKGHWLFGGGTKLAVLGAAAEQKLIS

SEQ ID NO: 664 - protein, 296 aa, synthetic construct
  source 1..296: note = DCAF1-(GS)5-INT41 peptide
QAPINFTSRLNRRASFPKYGGVDGGCFDRHLIFSRGSGSGSGSGSAEVQLVVSGGGLVKPGGSMILSCAASGFTFSNYSMNWVRQAPGKGLEWVSSISSSSEYIYYADFVKGRFTISRDNAKNSLYLQMDSLRAEDTAVYYCAWPGYRKAWGRGTLVTVSSGGGGSGGGGSGGGGSQSVLTQPASVSGSPGQSITISCAGTSSDVGGYNYVSWYQQHPGKAPKLMIYEDSKRPSGVSNRFSGSKSGNTASLTISGLRAEDEADYYCSYCASKGHWLFGGGTKLAVLGAAAEQKLIS

SEQ ID NO: 665 - protein, 298 aa, synthetic construct
  source 1..298: note = DCAF1-(GS)6-INT41 peptide
QAPINFTSRLNRRASFPKYGGVDGGCFDRHLIFSRGSGSGSGSGSGSAEVQLVVSGGGLVKPGGSMILSCAASGFTFSNYSMNWVRQAPGKGLEWVSSISSSSEYIYYADFVKGRFTISRDNAKNSLYLQMDSLRAEDTAVYYCAWPGYRKAWGRGTLVTVSSGGGGSGGGGSGGGGSQSVLTQPASVSGSPGQSITISCAGTSSDVGGYNYVSWYQQHPGKAPKLMIYEDSKRPSGVSNRFSGSKSGNTASLTISGLRAEDEADYYCSYCASKGHWLFGGGTKLAVLGAAAEQKLIS

SEQ ID NO: 666 - protein, 304 aa, synthetic construct
  source 1..304: note = HA-DCAF1-(GS)1-INT41 peptide
MYPYDVPDYAGSGSGSQAPINFTSRLNRRASFPKYGGVDGGCFDRHLIFSRGSAEVQLVVSGGGLVKPGGSMILSCAASGFTFSNYSMNWVRQAPGKGLEWVSSISSSSEYIYYADFVKGRFTISRDNAKNSLYLQMDSLRAEDTAVYYCAWPGYRKAWGRGTLVTVSSGGGGSGGGGSGGGGSQSVLTQPASVSGSPGQSITISCAGTSSDVGGYNYVSWYQQHPGKAPKLMIYEDSKRPSGVSNRFSGSKSGNTASLTISGLRAEDEADYYCSYCASKGHWLFGGGTKLAVLGAAAEQKLIS

SEQ ID NO: 667 - protein, 306 aa, synthetic construct
  source 1..306: note = HA-DCAF1-(GS)2-INT41 peptide
MYPYDVPDYAGSGSGSQAPINFTSRLNRRASFPKYGGVDGGCFDRHLIFSRGSGSAEVQLVVSGGGLVKPGGSMILSCAASGFTFSNYSMNWVRQAPGKGLEWVSSISSSSEYIYYADFVKGRFTISRDNAKNSLYLQMDSLRAEDTAVYYCAWPGYRKAWGRGTLVTVSSGGGGSGGGGSGGGGSQSVLTQPASVSGSPGQSITISCAGTSSDVGGYNYVSWYQQHPGKAPKLMIYEDSKRPSGVSNRFSGSKSGNTASLTISGLRAEDEADYYCSYCASKGHWLFGGGTKLAVLGAAAEQKLIS

SEQ ID NO: 668 - protein, 308 aa, synthetic construct
  source 1..308: note = HA-DCAF1-(GS)3-INT41 peptide
MYPYDVPDYAGSGSGSQAPINFTSRLNRRASFPKYGGVDGGCFDRHLIFSRGSGSGSAEVQLVVSGGGLVKPGGSMILSCAASGFTFSNYSMNWVRQAPGKGLEWVSSISSSSEYIYYADFVKGRFTISRDNAKNSLYLQMDSLRAEDTAVYYCAWPGYRKAWGRGTLVTVSSGGGGSGGGGSGGGGSQSVLTQPASVSGSPGQSITISCAGTSSDVGGYNYVSWYQQHPGKAPKLMIYEDSKRPSGVSNRFSGSKSGNTASLTISGLRAEDEADYYCSYCASKGHWLFGGGTKLAVLGAAAEQKLIS

SEQ ID NO: 669 - protein, 310 aa, synthetic construct
  source 1..310: note = HA-DCAF1-(GS)4-INT41 peptide
MYPYDVPDYAGSGSGSQAPINFTSRLNRRASFPKYGGVDGGCFDRHLIFSRGSGSGSGSAEVQLVVSGGGLVKPGGSMILSCAASGFTFSNYSMNWVRQAPGKGLEWVSSISSSSEYIYYADFVKGRFTISRDNAKNSLYLQMDSLRAEDTAVYYCAWPGYRKAWGRGTLVTVSSGGGGSGGGGSGGGGSQSVLTQPASVSGSPGQSITISCAGTSSDVGGYNYVSWYQQHPGKAPKLMIYEDSKRPSGVSNRFSGSKSGNTASLTISGLRAEDEADYYCSYCASKGHWLFGGGTKLAVLGAAAEQKLIS

SEQ ID NO: 670 - protein, 312 aa, synthetic construct
  source 1..312: note = HA-DCAF1-(GS)5-INT41 peptide
MYPYDVPDYAGSGSGSQAPINFTSRLNRRASFPKYGGVDGGCFDRHLIFSRGSGSGSGSGSAEVQLVVSGGGLVKPGGSMILSCAASGFTFSNYSMNWVRQAPGKGLEWVSSISSSSEYIYYADFVKGRFTISRDNAKNSLYLQMDSLRAEDTAVYYCAWPGYRKAWGRGTLVTVSSGGGGSGGGGSGGGGSQSVLTQPASVSGSPGQSITISCAGTSSDVGGYNYVSWYQQHPGKAPKLMIYEDSKRPSGVSNRFSGSKSGNTASLTISGLRAEDEADYYCSYCASKGHWLFGGGTKLAVLGAAAEQKLIS

SEQ ID NO: 671 - protein, 314 aa, synthetic construct
  source 1..314: note = HA-DCAF1-(GS)6-INT41 peptide
MYPYDVPDYAGSGSGSQAPINFTSRLNRRASFPKYGGVDGGCFDRHLIFSRGSGSGSGSGSGSAEVQLVVSGGGLVKPGGSMILSCAASGFTFSNYSMNWVRQAPGKGLEWVSSISSSSEYIYYADFVKGRFTISRDNAKNSLYLQMDSLRAEDTAVYYCAWPGYRKAWGRGTLVTVSSGGGGSGGGGSGGGGSQSVLTQPASVSGSPGQSITISCAGTSSDVGGYNYVSWYQQHPGKAPKLMIYEDSKRPSGVSNRFSGSKSGNTASLTISGLRAEDEADYYCSYCASKGHWLFGGGTKLAVLGAAAEQKLIS

SEQ ID NO: 672 - protein, 609 aa, synthetic construct
  source 1..609: note = INT41-(GS)1-E6AP peptide
AEVQLVVSGGGLVKPGGSMILSCAASGFTFSNYSMNWVRQAPGKGLEWVSSISSSSEYIYYADFVKGRFTISRDNAKNSLYLQMDSLRAEDTAVYYCAWPGYRKAWGRGTLVTVSSGGGGSGGGGSGGGGSQSVLTQPASVSGSPGQSITISCAGTSSDVGGYNYVSWYQQHPGKAPKLMIYEDSKRPSGVSNRFSGSKSGNTASLTISGLRAEDEADYYCSYCASKGHWLFGGGTKLAVLGAAAEQKLISGSNPYLRLKVRRDHIIDDALVRLEMIAMENPADLKKQLYVEFEGEQGVDEGGVSKEFFQLVVEEIFNPDIGMFTYDESTKLFWFNPSSFETEGQFTLIGIVLGLAIYNNCILDVHFPMVVYRKLMGKKGTFRDLGDSHPVLYQSLKDLLEYEGNVEDDMMITFQISQTDLFGNPMMYDLKENGDKIPITNENRKEFVNLYSDYILNKSVEKQFKAFRRGFHMVTNESPLKYLFRPEEIELLICGSRNLDFQALEETTEYDGGYTRDSVLIREFWEIVHSFTDEQKRLFLQFTTGTDRAPVGGLGKLKMIIAKNGPDTERLPTSHTCFNVLLLPEYSSKEKLKERLLKAITYAKGFGML

SEQ ID NO: 673 - protein, 611 aa, synthetic construct
  source 1..611: note = INT41-(GS)2-E6AP peptide
AEVQLVVSGGGLVKPGGSMILSCAASGFTFSNYSMNWVRQAPGKGLEWVSSISSSSEYIYYADFVKGRFTISRDNAKNSLYLQMDSLRAEDTAVYYCAWPGYRKAWGRGTLVTVSSGGGGSGGGGSGGGGSQSVLTQPASVSGSPGQSITISCAGTSSDVGGYNYVSWYQQHPGKAPKLMIYEDSKRPSGVSNRFSGSKSGNTASLTISGLRAEDEADYYCSYCASKGHWLFGGGTKLAVLGAAAEQKLISGSGSNPYLRLKVRRDHIIDDALVRLEMIAMENPADLKKQLYVEFEGEQGVDEGGVSKEFFQLVVEEIFNPDIGMFTYDESTKLFWFNPSSFETEGQFTLIGIVLGLAIYNNCILDVHFPMVVYRKLMGKKGTFRDLGDSHPVLYQSLKDLLEYEGNVEDDMMITFQISQTDLFGNPMMYDLKENGDKIPITNENRKEFVNLYSDYILNKSVEKQFKAFRRGFHMVTNESPLKYLFRPEEIELLICGSRNLDFQALEETTEYDGGYTRDSVLIREFWEIVHSFTDEQKRLFLQFTTGTDRAPVGGLGKLKMIIAKNGPDTERLPTSHTCFNVLLLPEYSSKEKLKERLLKAITYAKGFGML

SEQ ID NO: 674 - protein, 613 aa, synthetic construct
  source 1..613: note = INT41-(GS)3-E6AP peptide
AEVQLVVSGGGLVKPGGSMILSCAASGFTFSNYSMNWVRQAPGKGLEWVSSISSSSEYIYYADFVKGRFTISRDNAKNSLYLQMDSLRAEDTAVYYCAWPGYRKAWGRGTLVTVSSGGGGSGGGGSGGGGSQSVLTQPASVSGSPGQSITISCAGTSSDVGGYNYVSWYQQHPGKAPKLMIYEDSKRPSGVSNRFSGSKSGNTASLTISGLRAEDEADYYCSYCASKGHWLFGGGTKLAVLGAAAEQKLISGSGSGSNPYLRLKVRRDHIIDDALVRLEMIAMENPADLKKQLYVEFEGEQGVDEGGVSKEFFQLVVEEIFNPDIGMFTYDESTKLFWFNPSSFETEGQFTLIGIVLGLAIYNNCILDVHFPMVVYRKLMGKKGTFRDLGDSHPVLYQSLKDLLEYEGNVEDDMMITFQISQTDLFGNPMMYDLKENGDKIPITNENRKEFVNLYSDYILNKSVEKQFKAFRRGFHMVTNESPLKYLFRPEEIELLICGSRNLDFQALEETTEYDGGYTRDSVLIREFWEIVHSFTDEQKRLFLQFTTGTDRAPVGGLGKLKMIIAKNGPDTERLPTSHTCFNVLLLPEYSSKEKLKERLLKAITYAKGFGML

SEQ ID NO: 675 - protein, 615 aa, synthetic construct
  source 1..615: note = INT41-(GS)4-E6AP peptide
AEVQLVVSGGGLVKPGGSMILSCAASGFTFSNYSMNWVRQAPGKGLEWVSSISSSSEYIYYADFVKGRFTISRDNAKNSLYLQMDSLRAEDTAVYYCAWPGYRKAWGRGTLVTVSSGGGGSGGGGSGGGGSQSVLTQPASVSGSPGQSITISCAGTSSDVGGYNYVSWYQQHPGKAPKLMIYEDSKRPSGVSNRFSGSKSGNTASLTISGLRAEDEADYYCSYCASKGHWLFGGGTKLAVLGAAAEQKLISGSGSGSGSNPYLRLKVRRDHIIDDALVRLEMIAMENPADLKKQLYVEFEGEQGVDEGGVSKEFFQLVVEEIFNPDIGMFTYDESTKLFWFNPSSFETEGQFTLIGIVLGLAIYNNCILDVHFPMVVYRKLMGKKGTFRDLGDSHPVLYQSLKDLLEYEGNVEDDMMITFQISQTDLFGNPMMYDLKENGDKIPITNENRKEFVNLYSDYILNKSVEKQFKAFRRGFHMVTNESPLKYLFRPEEIELLICGSRNLDFQALEETTEYDGGYTRDSVLIREFWEIVHSFTDEQKRLFLQFTTGTDRAPVGGLGKLKMIIAKNGPDTERLPTSHTCFNVLLLPEYSSKEKLKERLLKAITYAKGFGML

SEQ ID NO: 676 - protein, 617 aa, synthetic construct
  source 1..617: note = INT41-(GS)5-E6AP peptide
AEVQLVVSGGGLVKPGGSMILSCAASGFTFSNYSMNWVRQAPGKGLEWVSSISSSSEYIYYADFVKGRFTISRDNAKNSLYLQMDSLRAEDTAVYYCAWPGYRKAWGRGTLVTVSSGGGGSGGGGSGGGGSQSVLTQPASVSGSPGQSITISCAGTSSDVGGYNYVSWYQQHPGKAPKLMIYEDSKRPSGVSNRFSGSKSGNTASLTISGLRAEDEADYYCSYCASKGHWLFGGGTKLAVLGAAAEQKLISGSGSGSGSGSNPYLRLKVRRDHIIDDALVRLEMIAMENPADLKKQLYVEFEGEQGVDEGGVSKEFFQLVVEEIFNPDIGMFTYDESTKLFWFNPSSFETEGQFTLIGIVLGLAIYNNCILDVHFPMVVYRKLMGKKGTFRDLGDSHPVLYQSLKDLLEYEGNVEDDMMITFQISQTDLFGNPMMYDLKENGDKIPITNENRKEFVNLYSDYILNKSVEKQFKAFRRGFHMVTNESPLKYLFRPEEIELLICGSRNLDFQALEETTEYDGGYTRDSVLIREFWEIVHSFTDEQKRLFLQFTTGTDRAPVGGLGKLKMIIAKNGPDTERLPTSHTCFNVLLLPEYSSKEKLKERLLKAITYAKGFGML

SEQ ID NO: 677 - protein, 619 aa, synthetic construct
  source 1..619: note = INT41-(GS)6-E6AP peptide
AEVQLVVSGGGLVKPGGSMILSCAASGFTFSNYSMNWVRQAPGKGLEWVSSISSSSEYIYYADFVKGRFTISRDNAKNSLYLQMDSLRAEDTAVYYCAWPGYRKAWGRGTLVTVSSGGGGSGGGGSGGGGSQSVLTQPASVSGSPGQSITISCAGTSSDVGGYNYVSWYQQHPGKAPKLMIYEDSKRPSGVSNRFSGSKSGNTASLTISGLRAEDEADYYCSYCASKGHWLFGGGTKLAVLGAAAEQKLISGSGSGSGSGSGSNPYLRLKVRRDHIIDDALVRLEMIAMENPADLKKQLYVEFEGEQGVDEGGVSKEFFQLVVEEIFNPDIGMFTYDESTKLFWFNPSSFETEGQFTLIGIVLGLAIYNNCILDVHFPMVVYRKLMGKKGTFRDLGDSHPVLYQSLKDLLEYEGNVEDDMMITFQISQTDLFGNPMMYDLKENGDKIPITNENRKEFVNLYSDYILNKSVEKQFKAFRRGFHMVTNESPLKYLFRPEEIELLICGSRNLDFQALEETTEYDGGYTRDSVLIREFWEIVHSFTDEQKRLFLQFTTGTDRAPVGGLGKLKMIIAKNGPDTERLPTSHTCFNVLLLPEYSSKEKLKERLLKAITYAKGFGML

SEQ ID NO: 678 - protein, 625 aa, synthetic construct
  source 1..625: note = HA-INT41-(GS)1-E6AP peptide
MYPYDVPDYAGSGSGSAEVQLVVSGGGLVKPGGSMILSCAASGFTFSNYSMNWVRQAPGKGLEWVSSISSSSEYIYYADFVKGRFTISRDNAKNSLYLQMDSLRAEDTAVYYCAWPGYRKAWGRGTLVTVSSGGGGSGGGGSGGGGSQSVLTQPASVSGSPGQSITISCAGTSSDVGGYNYVSWYQQHPGKAPKLMIYEDSKRPSGVSNRFSGSKSGNTASLTISGLRAEDEADYYCSYCASKGHWLFGGGTKLAVLGAAAEQKLISGSNPYLRLKVRRDHIIDDALVRLEMIAMENPADLKKQLYVEFEGEQGVDEGGVSKEFFQLVVEEIFNPDIGMFTYDESTKLFWFNPSSFETEGQFTLIGIVLGLAIYNNCILDVHFPMVVYRKLMGKKGTFRDLGDSHPVLYQSLKDLLEYEGNVEDDMMITFQISQTDLFGNPMMYDLKENGDKIPITNENRKEFVNLYSDYILNKSVEKQFKAFRRGFHMVTNESPLKYLFRPEEIELLICGSRNLDFQALEETTEYDGGYTRDSVLIREFWEIVHSFTDEQKRLFLQFTTGTDRAPVGGLGKLKMIIAKNGPDTERLPTSHTCFNVLLLPEYSSKEKLKERLLKAITYAKGFGML

SEQ ID NO: 679 - protein, 627 aa, synthetic construct
  source 1..627: note = HA-INT41-(GS)2-E6AP peptide
MYPYDVPDYAGSGSGSAEVQLVVSGGGLVKPGGSMILSCAASGFTFSNYSMNWVRQAPGKGLEWVSSISSSSEYIYYADFVKGRFTISRDNAKNSLYLQMDSLRAEDTAVYYCAWPGYRKAWGRGTLVTVSSGGGGSGGGGSGGGGSQSVLTQPASVSGSPGQSITISCAGTSSDVGGYNYVSWYQQHPGKAPKLMIYEDSKRPSGVSNRFSGSKSGNTASLTISGLRAEDEADYYCSYCASKGHWLFGGGTKLAVLGAAAEQKLISGSGSNPYLRLKVRRDHIIDDALVRLEMIAMENPADLKKQLYVEFEGEQGVDEGGVSKEFFQLVVEEIFNPDIGMFTYDESTKLFWFNPSSFETEGQFTLIGIVLGLAIYNNCILDVHFPMVVYRKLMGKKGTFRDLGDSHPVLYQSLKDLLEYEGNVEDDMMITFQISQTDLFGNPMMYDLKENGDKIPITNENRKEFVNLYSDYILNKSVEKQFKAFRRGFHMVTNESPLKYLFRPEEIELLICGSRNLDFQALEETTEYDGGYTRDSVLIREFWEIVHSFTDEQKRLFLQFTTGTDRAPVGGLGKLKMIIAKNGPDTERLPTSHTCFNVLLLPEYSSKEKLKERLLKAITYAKGFGML

SEQ ID NO: 680 - protein, 629 aa, synthetic construct
  source 1..629: note = HA-INT41-(GS)3-E6AP peptide
MYPYDVPDYAGSGSGSAEVQLVVSGGGLVKPGGSMILSCAASGFTFSNYSMNWVRQAPGKGLEWVSSISSSSEYIYYADFVKGRFTISRDNAKNSLYLQMDSLRAEDTAVYYCAWPGYRKAWGRGTLVTVSSGGGGSGGGGSGGGGSQSVLTQPASVSGSPGQSITISCAGTSSDVGGYNYVSWYQQHPGKAPKLMIYEDSKRPSGVSNRFSGSKSGNTASLTISGLRAEDEADYYCSYCASKGHWLFGGGTKLAVLGAAAEQKLISGSGSGSNPYLRLKVRRDHIIDDALVRLEMIAMENPADLKKQLYVEFEGEQGVDEGGVSKEFFQLVVEEIFNPDIGMFTYDESTKLFWFNPSSFETEGQFTLIGIVLGLAIYNNCILDVHFPMVVYRKLMGKKGTFRDLGDSHPVLYQSLKDLLEYEGNVEDDMMITFQISQTDLFGNPMMYDLKENGDKIPITNENRKEFVNLYSDYILNKSVEKQFKAFRRGFHMVTNESPLKYLFRPEEIELLICGSRNLDFQALEETTEYDGGYTRDSVLIREFWEIVHSFTDEQKRLFLQFTTGTDRAPVGGLGKLKMIIAKNGPDTERLPTSHTCFNVLLLPEYSSKEKLKERLLKAITYAKGFGML

SEQ ID NO: 681 - protein, 631 aa, synthetic construct
  source 1..631: note = HA-INT41-(GS)4-E6AP peptide
MYPYDVPDYAGSGSGSAEVQLVVSGGGLVKPGGSMILSCAASGFTFSNYSMNWVRQAPGKGLEWVSSISSSSEYIYYADFVKGRFTISRDNAKNSLYLQMDSLRAEDTAVYYCAWPGYRKAWGRGTLVTVSSGGGGSGGGGSGGGGSQSVLTQPASVSGSPGQSITISCAGTSSDVGGYNYVSWYQQHPGKAPKLMIYEDSKRPSGVSNRFSGSKSGNTASLTISGLRAEDEADYYCSYCASKGHWLFGGGTKLAVLGAAAEQKLISGSGSGSGSNPYLRLKVRRDHIIDDALVRLEMIAMENPADLKKQLYVEFEGEQGVDEGGVSKEFFQLVVEEIFNPDIGMFTYDESTKLFWFNPSSFETEGQFTLIGIVLGLAIYNNCILDVHFPMVVYRKLMGKKGTFRDLGDSHPVLYQSLKDLLEYEGNVEDDMMITFQISQTDLFGNPMMYDLKENGDKIPITNENRKEFVNLYSDYILNKSVEKQFKAFRRGFHMVTNESPLKYLFRPEEIELLICGSRNLDFQALEETTEYDGGYTRDSVLIREFWEIVHSFTDEQKRLFLQFTTGTDRAPVGGLGKLKMIIAKNGPDTERLPTSHTCFNVLLLPEYSSKEKLKERLLKAITYAKGFGML

SEQ ID NO: 682 - protein, 633 aa, synthetic construct
  source 1..633: note = HA-INT41-(GS)5-E6AP peptide
MYPYDVPDYAGSGSGSAEVQLVVSGGGLVKPGGSMILSCAASGFTFSNYSMNWVRQAPGKGLEWVSSISSSSEYIYYADFVKGRFTISRDNAKNSLYLQMDSLRAEDTAVYYCAWPGYRKAWGRGTLVTVSSGGGGSGGGGSGGGGSQSVLTQPASVSGSPGQSITISCAGTSSDVGGYNYVSWYQQHPGKAPKLMIYEDSKRPSGVSNRFSGSKSGNTASLTISGLRAEDEADYYCSYCASKGHWLFGGGTKLAVLGAAAEQKLISGSGSGSGSGSNPYLRLKVRRDHIIDDALVRLEMIAMENPADLKKQLYVEFEGEQGVDEGGVSKEFFQLVVEEIFNPDIGMFTYDESTKLFWFNPSSFETEGQFTLIGIVLGLAIYNNCILDVHFPMVVYRKLMGKKGTFRDLGDSHPVLYQSLKDLLEYEGNVEDDMMITFQISQTDLFGNPMMYDLKENGDKIPITNENRKEFVNLYSDYILNKSVEKQFKAFRRGFHMVTNESPLKYLFRPEEIELLICGSRNLDFQALEETTEYDGGYTRDSVLIREFWEIVHSFTDEQKRLFLQFTTGTDRAPVGGLGKLKMIIAKNGPDTERLPTSHTCFNVLLLPEYSSKEKLKERLLKAITYAKGFGML

SEQ ID NO: 683 - protein, 635 aa, synthetic construct
  source 1..635: note = HA-INT41-(GS)6-E6AP peptide
MYPYDVPDYAGSGSGSAEVQLVVSGGGLVKPGGSMILSCAASGFTFSNYSMNWVRQAPGKGLEWVSSISSSSEYIYYADFVKGRFTISRDNAKNSLYLQMDSLRAEDTAVYYCAWPGYRKAWGRGTLVTVSSGGGGSGGGGSGGGGSQSVLTQPASVSGSPGQSITISCAGTSSDVGGYNYVSWYQQHPGKAPKLMIYEDSKRPSGVSNRFSGSKSGNTASLTISGLRAEDEADYYCSYCASKGHWLFGGGTKLAVLGAAAEQKLISGSGSGSGSGSGSNPYLRLKVRRDHIIDDALVRLEMIAMENPADLKKQLYVEFEGEQGVDEGGVSKEFFQLVVEEIFNPDIGMFTYDESTKLFWFNPSSFETEGQFTLIGIVLGLAIYNNCILDVHFPMVVYRKLMGKKGTFRDLGDSHPVLYQSLKDLLEYEGNVEDDMMITFQISQTDLFGNPMMYDLKENGDKIPITNENRKEFVNLYSDYILNKSVEKQFKAFRRGFHMVTNESPLKYLFRPEEIELLICGSRNLDFQALEETTEYDGGYTRDSVLIREFWEIVHSFTDEQKRLFLQFTTGTDRAPVGGLGKLKMIIAKNGPDTERLPTSHTCFNVLLLPEYSSKEKLKERLLKAITYAKGFGML

SEQ ID NO: 684 - protein, 540 aa, synthetic construct
  source 1..540: note = FBXW7b-(GS)1-INT41 peptide
CVPRSGLILSCICLYCGVLLPVLLPNLPFLTCLSMSTLESVTYLPEKGLYCQRLPSSRTHGGTESLKGKNTENMGFYGTLKMIFYKMKRKLDHGSEVRSFSLGKKPCKVSEYTSTTGLVPCSATPTTFGDLRAANGQGQQRRRITSVQPPTGLQEWLKMFQSWSGPEKLLALDELIDSCEPTQVKHMMQVIEPQFQRDFISLLPKELALYVLSFLEPKDLLQAAQTCRYWRILAEDNLLWREKCKEEGIDEPLHIKRRKVIKPGFIHSPWKSAYIRQHRIDTNSRRGGSAEVQLVVSGGGLVKPGGSMILSCAASGFTFSNYSMNWVRQAPGKGLEWVSSISSSSEYIYYADFVKGRFTISRDNAKNSLYLQMDSLRAEDTAVYYCAWPGYRKAWGRGTLVTVSSGGGGSGGGGSGGGGSQSVLTQPASVSGSPGQSITISCAGTSSDVGGYNYVSWYQQHPGKAPKLMIYEDSKRPSGVSNRFSGSKSGNTASLTISGLRAEDEADYYCSYCASKGHWLFGGGTKLAVLGAAAEQKLIS

SEQ ID NO: 685 - protein, 542 aa, synthetic construct
  source 1..542: note = FBXW7b-(GS)2-INT41 peptide
CVPRSGLILSCICLYCGVLLPVLLPNLPFLTCLSMSTLESVTYLPEKGLYCQRLPSSRTHGGTESLKGKNTENMGFYGTLKMIFYKMKRKLDHGSEVRSFSLGKKPCKVSEYTSTTGLVPCSATPTTFGDLRAANGQGQQRRRITSVQPPTGLQEWLKMFQSWSGPEKLLALDELIDSCEPTQVKHMMQVIEPQFQRDFISLLPKELALYVLSFLEPKDLLQAAQTCRYWRILAEDNLLWREKCKEEGIDEPLHIKRRKVIKPGFIHSPWKSAYIRQHRIDTNSRRGGSGSAEVQLVVSGGGLVKPGGSMILSCAASGFTFSNYSMNWVRQAPGKGLEWVSSISSSSEYIYYADFVKGRFTISRDNAKNSLYLQMDSLRAEDTAVYYCAWPGYRKAWGRGTLVTVSSGGGGSGGGGSGGGGSQSVLTQPASVSGSPGQSITISCAGTSSDVGGYNYVSWYQQHPGKAPKLMIYEDSKRPSGVSNRFSGSKSGNTASLTISGLRAEDEADYYCSYCASKGHWLFGGGTKLAVLGAAAEQKLIS

SEQ ID NO: 686 - protein, 544 aa, synthetic construct
  source 1..544: note = FBXW7b-(GS)3-INT41 peptide
CVPRSGLILSCICLYCGVLLPVLLPNLPFLTCLSMSTLESVTYLPEKGLYCQRLPSSRTHGGTESLKGKNTENMGFYGTLKMIFYKMKRKLDHGSEVRSFSLGKKPCKVSEYTSTTGLVPCSATPTTFGDLRAANGQGQQRRRITSVQPPTGLQEWLKMFQSWSGPEKLLALDELIDSCEPTQVKHMMQVIEPQFQRDFISLLPKELALYVLSFLEPKDLLQAAQTCRYWRILAEDNLLWREKCKEEGIDEPLHIKRRKVIKPGFIHSPWKSAYIRQHRIDTNSRRGGSGSGSAEVQLVVSGGGLVKPGGSMILSCAASGFTFSNYSMNWVRQAPGKGLEWVSSISSSSEYIYYADFVKGRFTISRDNAKNSLYLQMDSLRAEDTAVYYCAWPGYRKAWGRGTLVTVSSGGGGSGGGGSGGGGSQSVLTQPASVSGSPGQSITISCAGTSSDVGGYNYVSWYQQHPGKAPKLMIYEDSKRPSGVSNRFSGSKSGNTASLTISGLRAEDEADYYCSYCASKGHWLFGGGTKLAVLGAAAEQKLIS

SEQ ID NO: 687 - protein, 546 aa, synthetic construct
  source 1..546: note = FBXW7b-(GS)4-INT41 peptide
CVPRSGLILSCICLYCGVLLPVLLPNLPFLTCLSMSTLESVTYLPEKGLYCQRLPSSRTHGGTESLKGKNTENMGFYGTLKMIFYKMKRKLDHGSEVRSFSLGKKPCKVSEYTSTTGLVPCSATPTTFGDLRAANGQGQQRRRITSVQPPTGLQEWLKMFQSWSGPEKLLALDELIDSCEPTQVKHMMQVIEPQFQRDFISLLPKELALYVLSFLEPKDLLQAAQTCRYWRILAEDNLLWREKCKEEGIDEPLHIKRRKVIKPGFIHSPWKSAYIRQHRIDTNSRRGGSGSGSGSAEVQLVVSGGGLVKPGGSMILSCAASGFTFSNYSMNWVRQAPGKGLEWVSSISSSSEYIYYADFVKGRFTISRDNAKNSLYLQMDSLRAEDTAVYYCAWPGYRKAWGRGTLVTVSSGGGGSGGGGSGGGGSQSVLTQPASVSGSPGQSITISCAGTSSDVGGYNYVSWYQQHPGKAPKLMIYEDSKRPSGVSNRFSGSKSGNTASLTISGLRAEDEADYYCSYCASKGHWLFGGGTKLAVLGAAAEQKLIS

SEQ ID NO: 688 - protein, 548 aa, synthetic construct
  source 1..548: note = FBXW7b-(GS)5-INT41 peptide
CVPRSGLILSCICLYCGVLLPVLLPNLPFLTCLSMSTLESVTYLPEKGLYCQRLPSSRTHGGTESLKGKNTENMGFYGTLKMIFYKMKRKLDHGSEVRSFSLGKKPCKVSEYTSTTGLVPCSATPTTFGDLRAANGQGQQRRRITSVQPPTGLQEWLKMFQSWSGPEKLLALDELIDSCEPTQVKHMMQVIEPQFQRDFISLLPKELALYVLSFLEPKDLLQAAQTCRYWRILAEDNLLWREKCKEEGIDEPLHIKRRKVIKPGFIHSPWKSAYIRQHRIDTNSRRGGSGSGSGSGSAEVQLVVSGGGLVKPGGSMILSCAASGFTFSNYSMNWVRQAPGKGLEWVSSISSSSEYIYYADFVKGRFTISRDNAKNSLYLQMDSLRAEDTAVYYCAWPGYRKAWGRGTLVTVSSGGGGSGGGGSGGGGSQSVLTQPASVSGSPGQSITISCAGTSSDVGGYNYVSWYQQHPGKAPKLMIYEDSKRPSGVSNRFSGSKSGNTASLTISGLRAEDEADYYCSYCASKGHWLFGGGTKLAVLGAAAEQKLIS

SEQ ID NO: 689 - protein, 550 aa, synthetic construct
  source 1..550: note = FBXW7b-(GS)6-INT41 peptide
CVPRSGLILSCICLYCGVLLPVLLPNLPFLTCLSMSTLESVTYLPEKGLYCQRLPSSRTHGGTESLKGKNTENMGFYGTLKMIFYKMKRKLDHGSEVRSFSLGKKPCKVSEYTSTTGLVPCSATPTTFGDLRAANGQGQQRRRITSVQPPTGLQEWLKMFQSWSGPEKLLALDELIDSCEPTQVKHMMQVIEPQFQRDFISLLPKELALYVLSFLEPKDLLQAAQTCRYWRILAEDNLLWREKCKEEGIDEPLHIKRRKVIKPGFIHSPWKSAYIRQHRIDTNSRRGGSGSGSGSGSGSAEVQLVVSGGGLVKPGGSMILSCAASGFTFSNYSMNWVRQAPGKGLEWVSSISSSSEYIYYADFVKGRFTISRDNAKNSLYLQMDSLRAEDTAVYYCAWPGYRKAWGRGTLVTVSSGGGGSGGGGSGGGGSQSVLTQPASVSGSPGQSITISCAGTSSDVGGYNYVSWYQQHPGKAPKLMIYEDSKRPSGVSNRFSGSKSGNTASLTISGLRAEDEADYYCSYCASKGHWLFGGGTKLAVLGAAAEQKLIS

SEQ ID NO: 690 - protein, 550 aa, synthetic construct
  source 1..550: note = HA-FBXW7b-(GS)1-INT41 peptide
MYPYDVPDYACVPRSGLILSCICLYCGVLLPVLLPNLPFLTCLSMSTLESVTYLPEKGLYCQRLPSSRTHGGTESLKGKNTENMGFYGTLKMIFYKMKRKLDHGSEVRSFSLGKKPCKVSEYTSTTGLVPCSATPTTFGDLRAANGQGQQRRRITSVQPPTGLQEWLKMFQSWSGPEKLLALDELIDSCEPTQVKHMMQVIEPQFQRDFISLLPKELALYVLSFLEPKDLLQAAQTCRYWRILAEDNLLWREKCKEEGIDEPLHIKRRKVIKPGFIHSPWKSAYIRQHRIDTNSRRGGSAEVQLVVSGGGLVKPGGSMILSCAASGFTFSNYSMNWVRQAPGKGLEWVSSISSSSEYIYYADFVKGRFTISRDNAKNSLYLQMDSLRAEDTAVYYCAWPGYRKAWGRGTLVTVSSGGGGSGGGGSGGGGSQSVLTQPASVSGSPGQSITISCAGTSSDVGGYNYVSWYQQHPGKAPKLMIYEDSKRPSGVSNRFSGSKSGNTASLTISGLRAEDEADYYCSYCASKGHWLFGGGTKLAVLGAAAEQKLIS

SEQ ID NO: 691 - protein, 552 aa, synthetic construct
  source 1..552: note = HA-FBXW7b-(GS)2-INT41 peptide
MYPYDVPDYACVPRSGLILSCICLYCGVLLPVLLPNLPFLTCLSMSTLESVTYLPEKGLYCQRLPSSRTHGGTESLKGKNTENMGFYGTLKMIFYKMKRKLDHGSEVRSFSLGKKPCKVSEYTSTTGLVPCSATPTTFGDLRAANGQGQQRRRITSVQPPTGLQEWLKMFQSWSGPEKLLALDELIDSCEPTQVKHMMQVIEPQFQRDFISLLPKELALYVLSFLEPKDLLQAAQTCRYWRILAEDNLLWREKCKEEGIDEPLHIKRRKVIKPGFIHSPWKSAYIRQHRIDTNSRRGGSGSAEVQLVVSGGGLVKPGGSMILSCAASGFTFSNYSMNWVRQAPGKGLEWVSSISSSSEYIYYADFVKGRFTISRDNAKNSLYLQMDSLRAEDTAVYYCAWPGYRKAWGRGTLVTVSSGGGGSGGGGSGGGGSQSVLTQPASVSGSPGQSITISCAGTSSDVGGYNYVSWYQQHPGKAPKLMIYEDSKRPSGVSNRFSGSKSGNTASLTISGLRAEDEADYYCSYCASKGHWLFGGGTKLAVLGAAAEQKLIS

SEQ ID NO: 692 - protein, 554 aa, synthetic construct
  source 1..554: note = HA-FBXW7b-(GS)3-INT41 peptide
MYPYDVPDYACVPRSGLILSCICLYCGVLLPVLLPNLPFLTCLSMSTLESVTYLPEKGLYCQRLPSSRTHGGTESLKGKNTENMGFYGTLKMIFYKMKRKLDHGSEVRSFSLGKKPCKVSEYTSTTGLVPCSATPTTFGDLRAANGQGQQRRRITSVQPPTGLQEWLKMFQSWSGPEKLLALDELIDSCEPTQVKHMMQVIEPQFQRDFISLLPKELALYVLSFLEPKDLLQAAQTCRYWRILAEDNLLWREKCKEEGIDEPLHIKRRKVIKPGFIHSPWKSAYIRQHRIDTNSRRGGSGSGSAEVQLVVSGGGLVKPGGSMILSCAASGFTFSNYSMNWVRQAPGKGLEWVSSISSSSEYIYYADFVKGRFTISRDNAKNSLYLQMDSLRAEDTAVYYCAWPGYRKAWGRGTLVTVSSGGGGSGGGGSGGGGSQSVLTQPASVSGSPGQSITISCAGTSSDVGGYNYVSWYQQHPGKAPKLMIYEDSKRPSGVSNRFSGSKSGNTASLTISGLRAEDEADYYCSYCASKGHWLFGGGTKLAVLGAAAEQKLIS

SEQ ID NO: 693 - protein, 556 aa, synthetic construct
  source 1..556: note = HA-FBXW7b-(GS)4-INT41 peptide
MYPYDVPDYACVPRSGLILSCICLYCGVLLPVLLPNLPFLTCLSMSTLESVTYLPEKGLYCQRLPSSRTHGGTESLKGKNTENMGFYGTLKMIFYKMKRKLDHGSEVRSFSLGKKPCKVSEYTSTTGLVPCSATPTTFGDLRAANGQGQQRRRITSVQPPTGLQEWLKMFQSWSGPEKLLALDELIDSCEPTQVKHMMQVIEPQFQRDFISLLPKELALYVLSFLEPKDLLQAAQTCRYWRILAEDNLLWREKCKEEGIDEPLHIKRRKVIKPGFIHSPWKSAYIRQHRIDTNSRRGGSGSGSGSAEVQLVVSGGGLVKPGGSMILSCAASGFTFSNYSMNWVRQAPGKGLEWVSSISSSSEYIYYADFVKGRFTISRDNAKNSLYLQMDSLRAEDTAVYYCAWPGYRKAWGRGTLVTVSSGGGGSGGGGSGGGGSQSVLTQPASVSGSPGQSITISCAGTSSDVGGYNYVSWYQQHPGKAPKLMIYEDSKRPSGVSNRFSGSKSGNTASLTISGLRAEDEADYYCSYCASKGHWLFGGGTKLAVLGAAAEQKLIS

SEQ ID NO: 694 - protein, 558 aa, synthetic construct
  source 1..558: note = HA-FBXW7b-(GS)5-INT41 peptide
MYPYDVPDYACVPRSGLILSCICLYCGVLLPVLLPNLPFLTCLSMSTLESVTYLPEKGLYCQRLPSSRTHGGTESLKGKNTENMGFYGTLKMIFYKMKRKLDHGSEVRSFSLGKKPCKVSEYTSTTGLVPCSATPTTFGDLRAANGQGQQRRRITSVQPPTGLQEWLKMFQSWSGPEKLLALDELIDSCEPTQVKHMMQVIEPQFQRDFISLLPKELALYVLSFLEPKDLLQAAQTCRYWRILAEDNLLWREKCKEEGIDEPLHIKRRKVIKPGFIHSPWKSAYIRQHRIDTNSRRGGSGSGSGSGSAEVQLVVSGGGLVKPGGSMILSCAASGFTFSNYSMNWVRQAPGKGLEWVSSISSSSEYIYYADFVKGRFTISRDNAKNSLYLQMDSLRAEDTAVYYCAWPGYRKAWGRGTLVTVSSGGGGSGGGGSGGGGSQSVLTQPASVSGSPGQSITISCAGTSSDVGGYNYVSWYQQHPGKAPKLMIYEDSKRPSGVSNRFSGSKSGNTASLTISGLRAEDEADYYCSYCASKGHWLFGGGTKLAVLGAAAEQKLIS

SEQ ID NO: 695 - protein, 560 aa, synthetic construct
  source 1..560: note = HA-FBXW7b-(GS)6-INT41 peptide
MYPYDVPDYACVPRSGLILSCICLYCGVLLPVLLPNLPFLTCLSMSTLESVTYLPEKGLYCQRLPSSRTHGGTESLKGKNTENMGFYGTLKMIFYKMKRKLDHGSEVRSFSLGKKPCKVSEYTSTTGLVPCSATPTTFGDLRAANGQGQQRRRITSVQPPTGLQEWLKMFQSWSGPEKLLALDELIDSCEPTQVKHMMQVIEPQFQRDFISLLPKELALYVLSFLEPKDLLQAAQTCRYWRILAEDNLLWREKCKEEGIDEPLHIKRRKVIKPGFIHSPWKSAYIRQHRIDTNSRRGGSGSGSGSGSGSAEVQLVVSGGGLVKPGGSMILSCAASGFTFSNYSMNWVRQAPGKGLEWVSSISSSSEYIYYADFVKGRFTISRDNAKNSLYLQMDSLRAEDTAVYYCAWPGYRKAWGRGTLVTVSSGGGGSGGGGSGGGGSQSVLTQPASVSGSPGQSITISCAGTSSDVGGYNYVSWYQQHPGKAPKLMIYEDSKRPSGVSNRFSGSKSGNTASLTISGLRAEDEADYYCSYCASKGHWLFGGGTKLAVLGAAAEQKLIS

SEQ ID NO: 696 - protein, 574 aa, synthetic construct
  source 1..574: note = Keap1-(GS)1-INT41 peptide
QPDPRPSGAGACCRFLPLQSQCPEGAGDAVMYASTECKAEVTPSQHGNRTFSYTLEDHTKQAFGIMNELRLSQQLCDVTLQVKYQDAPAAQFMAHKVVLASSSPVFKAMFTNGLREQGMEVVSIEGIHPKVMERLIEFAYTASISMGEKCVLHVMNGAVMYQIDSVVRACSDFLVQQLDPSNAIGIANFAEQIGCVELHQRAREYIYMHFGEVAKQEEFFNLSHCQLVTLISRDDLNVRCESEVFHACINWVKYDCEQRRFYVQALLRAVRCHSLTPNFLQMQLQKCEILQSDSRCKDYLVKIFEELTLHKPTQVMPCRAPGSAEVQLVVSGGGLVKPGGSMILSCAASGFTFSNYSMNWVRQAPGKGLEWVSSISSSSEYIYYADFVKGRFTISRDNAKNSLYLQMDSLRAEDTAVYYCAWPGYRKAWGRGTLVTVSSGGGGSGGGGSGGGGSQSVLTQPASVSGSPGQSITISCAGTSSDVGGYNYVSWYQQHPGKAPKLMIYEDSKRPSGVSNRFSGSKSGNTASLTISGLRAEDEADYYCSYCASKGHWLFGGGTKLAVLGAAAEQKLIS

SEQ ID NO: 697 - protein, 576 aa, synthetic construct
  source 1..576: note = Keap1-(GS)2-INT41 peptide
QPDPRPSGAGACCRFLPLQSQCPEGAGDAVMYASTECKAEVTPSQHGNRTFSYTLEDHTKQAFGIMNELRLSQQLCDVTLQVKYQDAPAAQFMAHKVVLASSSPVFKAMFTNGLREQGMEVVSIEGIHPKVMERLIEFAYTASISMGEKCVLHVMNGAVMYQIDSVVRACSDFLVQQLDPSNAIGIANFAEQIGCVELHQRAREYIYMHFGEVAKQEEFFNLSHCQLVTLISRDDLNVRCESEVFHACINWVKYDCEQRRFYVQALLRAVRCHSLTPNFLQMQLQKCEILQSDSRCKDYLVKIFEELTLHKPTQVMPCRAPGSGSAEVQLVVSGGGLVKPGGSMILSCAASGFTFSNYSMNWVRQAPGKGLEWVSSISSSSEYIYYADFVKGRFTISRDNAKNSLYLQMDSLRAEDTAVYYCAWPGYRKAWGRGTLVTVSSGGGGSGGGGSGGGGSQSVLTQPASVSGSPGQSITISCAGTSSDVGGYNYVSWYQQHPGKAPKLMIYEDSKRPSGVSNRFSGSKSGNTASLTISGLRAEDEADYYCSYCASKGHWLFGGGTKLAVLGAAAEQKLIS

SEQ ID NO: 698 - protein, 578 aa, synthetic construct
  source 1..578: note = Keap1-(GS)3-INT41 peptide
QPDPRPSGAGACCRFLPLQSQCPEGAGDAVMYASTECKAEVTPSQHGNRTFSYTLEDHTKQAFGIMNELRLSQQLCDVTLQVKYQDAPAAQFMAHKVVLASSSPVFKAMFTNGLREQGMEVVSIEGIHPKVMERLIEFAYTASISMGEKCVLHVMNGAVMYQIDSVVRACSDFLVQQLDPSNAIGIANFAEQIGCVELHQRAREYIYMHFGEVAKQEEFFNLSHCQLVTLISRDDLNVRCESEVFHACINWVKYDCEQRRFYVQALLRAVRCHSLTPNFLQMQLQKCEILQSDSRCKDYLVKIFEELTLHKPTQVMPCRAPGSGSGSAEVQLVVSGGGLVKPGGSMILSCAASGFTFSNYSMNWVRQAPGKGLEWVSSISSSSEYIYYADFVKGRFTISRDNAKNSLYLQMDSLRAEDTAVYYCAWPGYRKAWGRGTLVTVSSGGGGSGGGGSGGGGSQSVLTQPASVSGSPGQSITISCAGTSSDVGGYNYVSWYQQHPGKAPKLMIYEDSKRPSGVSNRFSGSKSGNTASLTISGLRAEDEADYYCSYCASKGHWLFGGGTKLAVLGAAAEQKLIS

SEQ ID NO: 699 - protein, 580 aa, synthetic construct
  source 1..580: note = Keap1-(GS)4-INT41 peptide
QPDPRPSGAGACCRFLPLQSQCPEGAGDAVMYASTECKAEVTPSQHGNRTFSYTLEDHTKQAFGIMNELRLSQQLCDVTLQVKYQDAPAAQFMAHKVVLASSSPVFKAMFTNGLREQGMEVVSIEGIHPKVMERLIEFAYTASISMGEKCVLHVMNGAVMYQIDSVVRACSDFLVQQLDPSNAIGIANFAEQIGCVELHQRAREYIYMHFGEVAKQEEFFNLSHCQLVTLISRDDLNVRCESEVFHACINWVKYDCEQRRFYVQALLRAVRCHSLTPNFLQMQLQKCEILQSDSRCKDYLVKIFEELTLHKPTQVMPCRAPGSGSGSGSAEVQLVVSGGGLVKPGGSMILSCAASGFTFSNYSMNWVRQAPGKGLEWVSSISSSSEYIYYADFVKGRFTISRDNAKNSLYLQMDSLRAEDTAVYYCAWPGYRKAWGRGTLVTVSSGGGGSGGGGSGGGGSQSVLTQPASVSGSPGQSITISCAGTSSDVGGYNYVSWYQQHPGKAPKLMIYEDSKRPSGVSNRFSGSKSGNTASLTISGLRAEDEADYYCSYCASKGHWLFGGGTKLAVLGAAAEQKLIS

SEQ ID NO: 700 - protein, 582 aa, synthetic construct
  source 1..582: note = Keap1-(GS)5-INT41 peptide
QPDPRPSGAGACCRFLPLQSQCPEGAGDAVMYASTECKAEVTPSQHGNRTFSYTLEDHTKQAFGIMNELRLSQQLCDVTLQVKYQDAPAAQFMAHKVVLASSSPVFKAMFTNGLREQGMEVVSIEGIHPKVMERLIEFAYTASISMGEKCVLHVMNGAVMYQIDSVVRACSDFLVQQLDPSNAIGIANFAEQIGCVELHQRAREYIYMHFGEVAKQEEFFNLSHCQLVTLISRDDLNVRCESEVFHACINWVKYDCEQRRFYVQALLRAVRCHSLTPNFLQMQLQKCEILQSDSRCKDYLVKIFEELTLHKPTQVMPCRAPGSGSGSGSGSAEVQLVVSGGGLVKPGGSMILSCAASGFTFSNYSMNWVRQAPGKGLEWVSSISSSSEYIYYADFVKGRFTISRDNAKNSLYLQMDSLRAEDTAVYYCAWPGYRKAWGRGTLVTVSSGGGGSGGGGSGGGGSQSVLTQPASVSGSPGQSITISCAGTSSDVGGYNYVSWYQQHPGKAPKLMIYEDSKRPSGVSNRFSGSKSGNTASLTISGLRAEDEADYYCSYCASKGHWLFGGGTKLAVLGAAAEQKLIS

SEQ ID NO: 701 - protein, 584 aa, synthetic construct
  source 1..584: note = Keap1-(GS)6-INT41 peptide
QPDPRPSGAGACCRFLPLQSQCPEGAGDAVMYASTECKAEVTPSQHGNRTFSYTLEDHTKQAFGIMNELRLSQQLCDVTLQVKYQDAPAAQFMAHKVVLASSSPVFKAMFTNGLREQGMEVVSIEGIHPKVMERLIEFAYTASISMGEKCVLHVMNGAVMYQIDSVVRACSDFLVQQLDPSNAIGIANFAEQIGCVELHQRAREYIYMHFGEVAKQEEFFNLSHCQLVTLISRDDLNVRCESEVFHACINWVKYDCEQRRFYVQALLRAVRCHSLTPNFLQMQLQKCEILQSDSRCKDYLVKIFEELTLHKPTQVMPCRAPGSGSGSGSGSGSAEVQLVVSGGGLVKPGGSMILSCAASGFTFSNYSMNWVRQAPGKGLEWVSSISSSSEYIYYADFVKGRFTISRDNAKNSLYLQMDSLRAEDTAVYYCAWPGYRKAWGRGTLVTVSSGGGGSGGGGSGGGGSQSVLTQPASVSGSPGQSITISCAGTSSDVGGYNYVSWYQQHPGKAPKLMIYEDSKRPSGVSNRFSGSKSGNTASLTISGLRAEDEADYYCSYCASKGHWLFGGGTKLAVLGAAAEQKLIS

SEQ ID NO: 702 - protein, 590 aa, synthetic construct
  source 1..590: note = HA-Keap1-(GS)1-INT41 peptide
MYPYDVPDYAGSGSGSQPDPRPSGAGACCRFLPLQSQCPEGAGDAVMYASTECKAEVTPSQHGNRTFSYTLEDHTKQAFGIMNELRLSQQLCDVTLQVKYQDAPAAQFMAHKVVLASSSPVFKAMFTNGLREQGMEVVSIEGIHPKVMERLIEFAYTASISMGEKCVLHVMNGAVMYQIDSVVRACSDFLVQQLDPSNAIGIANFAEQIGCVELHQRAREYIYMHFGEVAKQEEFFNLSHCQLVTLISRDDLNVRCESEVFHACINWVKYDCEQRRFYVQALLRAVRCHSLTPNFLQMQLQKCEILQSDSRCKDYLVKIFEELTLHKPTQVMPCRAPGSAEVQLVVSGGGLVKPGGSMILSCAASGFTFSNYSMNWVRQAPGKGLEWVSSISSSSEYIYYADFVKGRFTISRDNAKNSLYLQMDSLRAEDTAVYYCAWPGYRKAWGRGTLVTVSSGGGGSGGGGSGGGGSQSVLTQPASVSGSPGQSITISCAGTSSDVGGYNYVSWYQQHPGKAPKLMIYEDSKRPSGVSNRFSGSKSGNTASLTISGLRAEDEADYYCSYCASKGHWLFGGGTKLAVLGAAAEQKLIS

SEQ ID NO: 703 - protein, 592 aa, synthetic construct
  source 1..592: note = HA-Keap1-(GS)2-INT41 peptide
MYPYDVPDYAGSGSGSQPDPRPSGAGACCRFLPLQSQCPEGAGDAVMYASTECKAEVTPSQHGNRTFSYTLEDHTKQAFGIMNELRLSQQLCDVTLQVKYQDAPAAQFMAHKVVLASSSPVFKAMFTNGLREQGMEVVSIEGIHPKVMERLIEFAYTASISMGEKCVLHVMNGAVMYQIDSVVRACSDFLVQQLDPSNAIGIANFAEQIGCVELHQRAREYIYMHFGEVAKQEEFFNLSHCQLVTLISRDDLNVRCESEVFHACINWVKYDCEQRRFYVQALLRAVRCHSLTPNFLQMQLQKCEILQSDSRCKDYLVKIFEELTLHKPTQVMPCRAPGSGSAEVQLVVSGGGLVKPGGSMILSCAASGFTFSNYSMNWVRQAPGKGLEWVSSISSSSEYIYYADFVKGRFTISRDNAKNSLYLQMDSLRAEDTAVYYCAWPGYRKAWGRGTLVTVSSGGGGSGGGGSGGGGSQSVLTQPASVSGSPGQSITISCAGTSSDVGGYNYVSWYQQHPGKAPKLMIYEDSKRPSGVSNRFSGSKSGNTASLTISGLRAEDEADYYCSYCASKGHWLFGGGTKLAVLGAAAEQKLIS

SEQ ID NO: 704 - protein, 594 aa, synthetic construct
  source 1..594: note = HA-Keap1-(GS)3-INT41 peptide
MYPYDVPDYAGSGSGSQPDPRPSGAGACCRFLPLQSQCPEGAGDAVMYASTECKAEVTPSQHGNRTFSYTLEDHTKQAFGIMNELRLSQQLCDVTLQVKYQDAPAAQFMAHKVVLASSSPVFKAMFTNGLREQGMEVVSIEGIHPKVMERLIEFAYTASISMGEKCVLHVMNGAVMYQIDSVVRACSDFLVQQLDPSNAIGIANFAEQIGCVELHQRAREYIYMHFGEVAKQEEFFNLSHCQLVTLISRDDLNVRCESEVFHACINWVKYDCEQRRFYVQALLRAVRCHSLTPNFLQMQLQKCEILQSDSRCKDYLVKIFEELTLHKPTQVMPCRAPGSGSGSAEVQLVVSGGGLVKPGGSMILSCAASGFTFSNYSMNWVRQAPGKGLEWVSSISSSSEYIYYADFVKGRFTISRDNAKNSLYLQMDSLRAEDTAVYYCAWPGYRKAWGRGTLVTVSSGGGGSGGGGSGGGGSQSVLTQPASVSGSPGQSITISCAGTSSDVGGYNYVSWYQQHPGKAPKLMIYEDSKRPSGVSNRFSGSKSGNTASLTISGLRAEDEADYYCSYCASKGHWLFGGGTKLAVLGAAAEQKLIS

SEQ ID NO: 705 - protein, 596 aa, synthetic construct
  source 1..596: note = HA-Keap1-(GS)4-INT41 peptide
MYPYDVPDYAGSGSGSQPDPRPSGAGACCRFLPLQSQCPEGAGDAVMYASTECKAEVTPSQHGNRTFSYTLEDHTKQAFGIMNELRLSQQLCDVTLQVKYQDAPAAQFMAHKVVLASSSPVFKAMFTNGLREQGMEVVSIEGIHPKVMERLIEFAYTASISMGEKCVLHVMNGAVMYQIDSVVRACSDFLVQQLDPSNAIGIANFAEQIGCVELHQRAREYIYMHFGEVAKQEEFFNLSHCQLVTLISRDDLNVRCESEVFHACINWVKYDCEQRRFYVQALLRAVRCHSLTPNFLQMQLQKCEILQSDSRCKDYLVKIFEELTLHKPTQVMPCRAPGSGSGSGSAEVQLVVSGGGLVKPGGSMILSCAASGFTFSNYSMNWVRQAPGKGLEWVSSISSSSEYIYYADFVKGRFTISRDNAKNSLYLQMDSLRAEDTAVYYCAWPGYRKAWGRGTLVTVSSGGGGSGGGGSGGGGSQSVLTQPASVSGSPGQSITISCAGTSSDVGGYNYVSWYQQHPGKAPKLMIYEDSKRPSGVSNRFSGSKSGNTASLTISGLRAEDEADYYCSYCASKGHWLFGGGTKLAVLGAAAEQKLIS

SEQ ID NO: 706 - protein, 598 aa, synthetic construct
  source 1..598: note = HA-Keap1-(GS)5-INT41 peptide
MYPYDVPDYAGSGSGSQPDPRPSGAGACCRFLPLQSQCPEGAGDAVMYASTECKAEVTPSQHGNRTFSYTLEDHTKQAFGIMNELRLSQQLCDVTLQVKYQDAPAAQFMAHKVVLASSSPVFKAMFTNGLREQGMEVVSIEGIHPKVMERLIEFAYTASISMGEKCVLHVMNGAVMYQIDSVVRACSDFLVQQLDPSNAIGIANFAEQIGCVELHQRAREYIYMHFGEVAKQEEFFNLSHCQLVTLISRDDLNVRCESEVFHACINWVKYDCEQRRFYVQALLRAVRCHSLTPNFLQMQLQKCEILQSDSRCKDYLVKIFEELTLHKPTQVMPCRAPGSGSGSGSGSAEVQLVVSGGGLVKPGGSMILSCAASGFTFSNYSMNWVRQAPGKGLEWVSSISSSSEYIYYADFVKGRFTISRDNAKNSLYLQMDSLRAEDTAVYYCAWPGYRKAWGRGTLVTVSSGGGGSGGGGSGGGGSQSVLTQPASVSGSPGQSITISCAGTSSDVGGYNYVSWYQQHPGKAPKLMIYEDSKRPSGVSNRFSGSKSGNTASLTISGLRAEDEADYYCSYCASKGHWLFGGGTKLAVLGAAAEQKLIS

SEQ ID NO: 707 - protein, 600 aa, synthetic construct
  source 1..600: note = HA-Keap1-(GS)6-INT41 peptide
MYPYDVPDYAGSGSGSQPDPRPSGAGACCRFLPLQSQCPEGAGDAVMYASTECKAEVTPSQHGNRTFSYTLEDHTKQAFGIMNELRLSQQLCDVTLQVKYQDAPAAQFMAHKVVLASSSPVFKAMFTNGLREQGMEVVSIEGIHPKVMERLIEFAYTASISMGEKCVLHVMNGAVMYQIDSVVRACSDFLVQQLDPSNAIGIANFAEQIGCVELHQRAREYIYMHFGEVAKQEEFFNLSHCQLVTLISRDDLNVRCESEVFHACINWVKYDCEQRRFYVQALLRAVRCHSLTPNFLQMQLQKCEILQSDSRCKDYLVKIFEELTLHKPTQVMPCRAPGSGSGSGSGSGSAEVQLVVSGGGLVKPGGSMILSCAASGFTFSNYSMNWVRQAPGKGLEWVSSISSSSEYIYYADFVKGRFTISRDNAKNSLYLQMDSLRAEDTAVYYCAWPGYRKAWGRGTLVTVSSGGGGSGGGGSGGGGSQSVLTQPASVSGSPGQSITISCAGTSSDVGGYNYVSWYQQHPGKAPKLMIYEDSKRPSGVSNRFSGSKSGNTASLTISGLRAEDEADYYCSYCASKGHWLFGGGTKLAVLGAAAEQKLIS

SEQ ID NO: 708 - protein, 380 aa, synthetic construct
  source 1..380: note = RNF125-(GS)1-INT41 peptide
GSVLSTDSGKSAPASATARALERRRDPELPVTSFDCAVCLEVLHQPVRTRCGHVFCRSCIATSLKNNKWTCPYCRAYLPSEGVPATDVAKRMKSEYKNCAECDTLVCLSEMRAHIRTCQKYIDKYGPGSAEVQLVVSGGGLVKPGGSMILSCAASGFTFSNYSMNWVRQAPGKGLEWVSSISSSSEYIYYADFVKGRFTISRDNAKNSLYLQMDSLRAEDTAVYYCAWPGYRKAWGRGTLVTVSSGGGGSGGGGSGGGGSQSVLTQPASVSGSPGQSITISCAGTSSDVGGYNYVSWYQQHPGKAPKLMIYEDSKRPSGVSNRFSGSKSGNTASLTISGLRAEDEADYYCSYCASKGHWLFGGGTKLAVLGAAAEQKLIS

SEQ ID NO: 709 - protein, 382 aa, synthetic construct
  source 1..382: note = RNF125-(GS)2-INT41 peptide
GSVLSTDSGKSAPASATARALERRRDPELPVTSFDCAVCLEVLHQPVRTRCGHVFCRSCIATSLKNNKWTCPYCRAYLPSEGVPATDVAKRMKSEYKNCAECDTLVCLSEMRAHIRTCQKYIDKYGPGSGSAEVQLVVSGGGLVKPGGSMILSCAASGFTFSNYSMNWVRQAPGKGLEWVSSISSSSEYIYYADFVKGRFTISRDNAKNSLYLQMDSLRAEDTAVYYCAWPGYRKAWGRGTLVTVSSGGGGSGGGGSGGGGSQSVLTQPASVSGSPGQSITISCAGTSSDVGGYNYVSWYQQHPGKAPKLMIYEDSKRPSGVSNRFSGSKSGNTASLTISGLRAEDEADYYCSYCASKGHWLFGGGTKLAVLGAAAEQKLIS

SEQ ID NO: 710 - protein, 384 aa, synthetic construct
  source 1..384: note = RNF125-(GS)3-INT41 peptide
GSVLSTDSGKSAPASATARALERRRDPELPVTSFDCAVCLEVLHQPVRTRCGHVFCRSCIATSLKNNKWTCPYCRAYLPSEGVPATDVAKRMKSEYKNCAECDTLVCLSEMRAHIRTCQKYIDKYGPGSGSGSAEVQLVVSGGGLVKPGGSMILSCAASGFTFSNYSMNWVRQAPGKGLEWVSSISSSSEYIYYADFVKGRFTISRDNAKNSLYLQMDSLRAEDTAVYYCAWPGYRKAWGRGTLVTVSSGGGGSGGGGSGGGGSQSVLTQPASVSGSPGQSITISCAGTSSDVGGYNYVSWYQQHPGKAPKLMIYEDSKRPSGVSNRFSGSKSGNTASLTISGLRAEDEADYYCSYCASKGHWLFGGGTKLAVLGAAAEQKLIS

SEQ ID NO: 711 - protein, 386 aa, synthetic construct
  source 1..386: note = RNF125-(GS)4-INT41 peptide
GSVLSTDSGKSAPASATARALERRRDPELPVTSFDCAVCLEVLHQPVRTRCGHVFCRSCIATSLKNNKWTCPYCRAYLPSEGVPATDVAKRMKSEYKNCAECDTLVCLSEMRAHIRTCQKYIDKYGPGSGSGSGSAEVQLVVSGGGLVKPGGSMILSCAASGFTFSNYSMNWVRQAPGKGLEWVSSISSSSEYIYYADFVKGRFTISRDNAKNSLYLQMDSLRAEDTAVYYCAWPGYRKAWGRGTLVTVSSGGGGSGGGGSGGGGSQSVLTQPASVSGSPGQSITISCAGTSSDVGGYNYVSWYQQHPGKAPKLMIYEDSKRPSGVSNRFSGSKSGNTASLTISGLRAEDEADYYCSYCASKGHWLFGGGTKLAVLGAAAEQKLIS

SEQ ID NO: 712 - protein, 388 aa, synthetic construct
  source 1..388: note = RNF125-(GS)5-INT41 peptide
GSVLSTDSGKSAPASATARALERRRDPELPVTSFDCAVCLEVLHQPVRTRCGHVFCRSCIATSLKNNKWTCPYCRAYLPSEGVPATDVAKRMKSEYKNCAECDTLVCLSEMRAHIRTCQKYIDKYGPGSGSGSGSGSAEVQLVVSGGGLVKPGGSMILSCAASGFTFSNYSMNWVRQAPGKGLEWVSSISSSSEYIYYADFVKGRFTISRDNAKNSLYLQMDSLRAEDTAVYYCAWPGYRKAWGRGTLVTVSSGGGGSGGGGSGGGGSQSVLTQPASVSGSPGQSITISCAGTSSDVGGYNYVSWYQQHPGKAPKLMIYEDSKRPSGVSNRFSGSKSGNTASLTISGLRAEDEADYYCSYCASKGHWLFGGGTKLAVLGAAAEQKLIS

SEQ ID NO: 713 - protein, 390 aa, synthetic construct
  source 1..390: note = RNF125-(GS)6-INT41 peptide
GSVLSTDSGKSAPASATARALERRRDPELPVTSFDCAVCLEVLHQPVRTRCGHVFCRSCIATSLKNNKWTCPYCRAYLPSEGVPATDVAKRMKSEYKNCAECDTLVCLSEMRAHIRTCQKYIDKYGPGSGSGSGSGSGSAEVQLVVSGGGLVKPGGSMILSCAASGFTFSNYSMNWVRQAPGKGLEWVSSISSSSEYIYYADFVKGRFTISRDNAKNSLYLQMDSLRAEDTAVYYCAWPGYRKAWGRGTLVTVSSGGGGSGGGGSGGGGSQSVLTQPASVSGSPGQSITISCAGTSSDVGGYNYVSWYQQHPGKAPKLMIYEDSKRPSGVSNRFSGSKSGNTASLTISGLRAEDEADYYCSYCASKGHWLFGGGTKLAVLGAAAEQKLIS

SEQ ID NO: 714 - protein, 396 aa, synthetic construct
  source 1..396: note = HA-RNF125-(GS)1-INT41 peptide
MYPYDVPDYAGSGSGSGSVLSTDSGKSAPASATARALERRRDPELPVTSFDCAVCLEVLHQPVRTRCGHVFCRSCIATSLKNNKWTCPYCRAYLPSEGVPATDVAKRMKSEYKNCAECDTLVCLSEMRAHIRTCQKYIDKYGPGSAEVQLVVSGGGLVKPGGSMILSCAASGFTFSNYSMNWVRQAPGKGLEWVSSISSSSEYIYYADFVKGRFTISRDNAKNSLYLQMDSLRAEDTAVYYCAWPGYRKAWGRGTLVTVSSGGGGSGGGGSGGGGSQSVLTQPASVSGSPGQSITISCAGTSSDVGGYNYVSWYQQHPGKAPKLMIYEDSKRPSGVSNRFSGSKSGNTASLTISGLRAEDEADYYCSYCASKGHWLFGGGTKLAVLGAAAEQKLIS

SEQ ID NO: 715 - protein, 398 aa, synthetic construct
  source 1..398: note = HA-RNF125-(GS)2-INT41 peptide
MYPYDVPDYAGSGSGSGSVLSTDSGKSAPASATARALERRRDPELPVTSFDCAVCLEVLHQPVRTRCGHVFCRSCIATSLKNNKWTCPYCRAYLPSEGVPATDVAKRMKSEYKNCAECDTLVCLSEMRAHIRTCQKYIDKYGPGSGSAEVQLVVSGGGLVKPGGSMILSCAASGFTFSNYSMNWVRQAPGKGLEWVSSISSSSEYIYYADFVKGRFTISRDNAKNSLYLQMDSLRAEDTAVYYCAWPGYRKAWGRGTLVTVSSGGGGSGGGGSGGGGSQSVLTQPASVSGSPGQSITISCAGTSSDVGGYNYVSWYQQHPGKAPKLMIYEDSKRPSGVSNRFSGSKSGNTASLTISGLRAEDEADYYCSYCASKGHWLFGGGTKLAVLGAAAEQKLIS

SEQ ID NO: 716 - protein, 400 aa, synthetic construct
  source 1..400: note = HA-RNF125-(GS)3-INT41 peptide
MYPYDVPDYAGSGSGSGSVLSTDSGKSAPASATARALERRRDPELPVTSFDCAVCLEVLHQPVRTRCGHVFCRSCIATSLKNNKWTCPYCRAYLPSEGVPATDVAKRMKSEYKNCAECDTLVCLSEMRAHIRTCQKYIDKYGPGSGSGSAEVQLVVSGGGLVKPGGSMILSCAASGFTFSNYSMNWVRQAPGKGLEWVSSISSSSEYIYYADFVKGRFTISRDNAKNSLYLQMDSLRAEDTAVYYCAWPGYRKAWGRGTLVTVSSGGGGSGGGGSGGGGSQSVLTQPASVSGSPGQSITISCAGTSSDVGGYNYVSWYQQHPGKAPKLMIYEDSKRPSGVSNRFSGSKSGNTASLTISGLRAEDEADYYCSYCASKGHWLFGGGTKLAVLGAAAEQKLIS

SEQ ID NO: 717 - protein, 402 aa, synthetic construct
  source 1..402: note = HA-RNF125-(GS)4-INT41 peptide
MYPYDVPDYAGSGSGSGSVLSTDSGKSAPASATARALERRRDPELPVTSFDCAVCLEVLHQPVRTRCGHVFCRSCIATSLKNNKWTCPYCRAYLPSEGVPATDVAKRMKSEYKNCAECDTLVCLSEMRAHIRTCQKYIDKYGPGSGSGSGSAEVQLVVSGGGLVKPGGSMILSCAASGFTFSNYSMNWVRQAPGKGLEWVSSISSSSEYIYYADFVKGRFTISRDNAKNSLYLQMDSLRAEDTAVYYCAWPGYRKAWGRGTLVTVSSGGGGSGGGGSGGGGSQSVLTQPASVSGSPGQSITISCAGTSSDVGGYNYVSWYQQHPGKAPKLMIYEDSKRPSGVSNRFSGSKSGNTASLTISGLRAEDEADYYCSYCASKGHWLFGGGTKLAVLGAAAEQKLIS

SEQ ID NO: 718 - protein, 404 aa, synthetic construct
  source 1..404: note = HA-RNF125-(GS)5-INT41 peptide
MYPYDVPDYAGSGSGSGSVLSTDSGKSAPASATARALERRRDPELPVTSFDCAVCLEVLHQPVRTRCGHVFCRSCIATSLKNNKWTCPYCRAYLPSEGVPATDVAKRMKSEYKNCAECDTLVCLSEMRAHIRTCQKYIDKYGPGSGSGSGSGSAEVQLVVSGGGLVKPGGSMILSCAASGFTFSNYSMNWVRQAPGKGLEWVSSISSSSEYIYYADFVKGRFTISRDNAKNSLYLQMDSLRAEDTAVYYCAWPGYRKAWGRGTLVTVSSGGGGSGGGGSGGGGSQSVLTQPASVSGSPGQSITISCAGTSSDVGGYNYVSWYQQHPGKAPKLMIYEDSKRPSGVSNRFSGSKSGNTASLTISGLRAEDEADYYCSYCASKGHWLFGGGTKLAVLGAAAEQKLIS

SEQ ID NO: 719 - protein, 406 aa, synthetic construct
  source 1..406: note = HA-RNF125-(GS)6-INT41 peptide
MYPYDVPDYAGSGSGSGSVLSTDSGKSAPASATARALERRRDPELPVTSFDCAVCLEVLHQPVRTRCGHVFCRSCIATSLKNNKWTCPYCRAYLPSEGVPATDVAKRMKSEYKNCAECDTLVCLSEMRAHIRTCQKYIDKYGPGSGSGSGSGSGSAEVQLVVSGGGLVKPGGSMILSCAASGFTFSNYSMNWVRQAPGKGLEWVSSISSSSEYIYYADFVKGRFTISRDNAKNSLYLQMDSLRAEDTAVYYCAWPGYRKAWGRGTLVTVSSGGGGSGGGGSGGGGSQSVLTQPASVSGSPGQSITISCAGTSSDVGGYNYVSWYQQHPGKAPKLMIYEDSKRPSGVSNRFSGSKSGNTASLTISGLRAEDEADYYCSYCASKGHWLFGGGTKLAVLGAAAEQKLIS

SEQ ID NO: 720 - protein, 237 aa, synthetic construct
  source 1..237: note = TCF4-(GS)1-CHIP-NLS peptide
MDDLGANDELISFKDEGEQEEKSSENSSAERDLADVKSSLVNESETGSRLNFGDDIPSALRIAKKKRWNSIEERRIHQESELHSYLSRLIAAERERELEECQRNHEGDEDDSHVRAQQACIEAKHDKYMADMDELFSQVDEKRKKRDIPDYLCGKISFELMREPCITPSGITYDRKDIEEHLQRVGHFDPVTRSPLTQEQLIPNLAMKEVIDAFISENGWVEDYGSGSPAAKRVKLD

SEQ ID NO: 721 - protein, 239 aa, synthetic construct
  source 1..239: note = TCF4-(GS)2-CHIP-NLS peptide
MDDLGANDELISFKDEGEQEEKSSENSSAERDLADVKSSLVNESETGSGSRLNFGDDIPSALRIAKKKRWNSIEERRIHQESELHSYLSRLIAAERERELEECQRNHEGDEDDSHVRAQQACIEAKHDKYMADMDELFSQVDEKRKKRDIPDYLCGKISFELMREPCITPSGITYDRKDIEEHLQRVGHFDPVTRSPLTQEQLIPNLAMKEVIDAFISENGWVEDYGSGSPAAKRVKLD

SEQ ID NO: 722 - protein, 241 aa, synthetic construct
  source 1..241: note = TCF4-(GS)3-CHIP-NLS peptide
MDDLGANDELISFKDEGEQEEKSSENSSAERDLADVKSSLVNESETGSGSGSRLNFGDDIPSALRIAKKKRWNSIEERRIHQESELHSYLSRLIAAERERELEECQRNHEGDEDDSHVRAQQACIEAKHDKYMADMDELFSQVDEKRKKRDIPDYLCGKISFELMREPCITPSGITYDRKDIEEHLQRVGHFDPVTRSPLTQEQLIPNLAMKEVIDAFISENGWVEDYGSGSPAAKRVKLD

SEQ ID NO: 723 - protein, 243 aa, synthetic construct
  source 1..243: note = TCF4-(GS)4-CHIP-NLS peptide
MDDLGANDELISFKDEGEQEEKSSENSSAERDLADVKSSLVNESETGSGSGSGSRLNFGDDIPSALRIAKKKRWNSIEERRIHQESELHSYLSRLIAAERERELEECQRNHEGDEDDSHVRAQQACIEAKHDKYMADMDELFSQVDEKRKKRDIPDYLCGKISFELMREPCITPSGITYDRKDIEEHLQRVGHFDPVTRSPLTQEQLIPNLAMKEVIDAFISENGWVEDYGSGSPAAKRVKLD

SEQ ID NO: 724 - protein, 245 aa, synthetic construct
  source 1..245: note = TCF4-(GS)5-CHIP-NLS peptide
MDDLGANDELISFKDEGEQEEKSSENSSAERDLADVKSSLVNESETGSGSGSGSGSRLNFGDDIPSALRIAKKKRWNSIEERRIHQESELHSYLSRLIAAERERELEECQRNHEGDEDDSHVRAQQACIEAKHDKYMADMDELFSQVDEKRKKRDIPDYLCGKISFELMREPCITPSGITYDRKDIEEHLQRVGHFDPVTRSPLTQEQLIPNLAMKEVIDAFISENGWVEDYGSGSPAAKRVKLD

SEQ ID NO: 725 - protein, 247 aa, synthetic construct
  source 1..247: note = TCF4-(GS)6-CHIP-NLS peptide
MDDLGANDELISFKDEGEQEEKSSENSSAERDLADVKSSLVNESETGSGSGSGSGSGSRLNFGDDIPSALRIAKKKRWNSIEERRIHQESELHSYLSRLIAAERERELEECQRNHEGDEDDSHVRAQQACIEAKHDKYMADMDELFSQVDEKRKKRDIPDYLCGKISFELMREPCITPSGITYDRKDIEEHLQRVGHFDPVTRSPLTQEQLIPNLAMKEVIDAFISENGWVEDYGSGSPAAKRVKLD

SEQ ID NO: 726 - protein, 246 aa, synthetic construct
  source 1..246: note = TCF4-(GS)1-CHIP-NLS-HA peptide
MDDLGANDELISFKDEGEQEEKSSENSSAERDLADVKSSLVNESETGSRLNFGDDIPSALRIAKKKRWNSIEERRIHQESELHSYLSRLIAAERERELEECQRNHEGDEDDSHVRAQQACIEAKHDKYMADMDELFSQVDEKRKKRDIPDYLCGKISFELMREPCITPSGITYDRKDIEEHLQRVGHFDPVTRSPLTQEQLIPNLAMKEVIDAFISENGWVEDYGSGSPAAKRVKLDYPYDVPDYA

SEQ ID NO: 727 - protein, 248 aa, synthetic construct
  source 1..248: note = TCF4-(GS)2-CHIP-NLS-HA peptide
MDDLGANDELISFKDEGEQEEKSSENSSAERDLADVKSSLVNESETGSGSRLNFGDDIPSALRIAKKKRWNSIEERRIHQESELHSYLSRLIAAERERELEECQRNHEGDEDDSHVRAQQACIEAKHDKYMADMDELFSQVDEKRKKRDIPDYLCGKISFELMREPCITPSGITYDRKDIEEHLQRVGHFDPVTRSPLTQEQLIPNLAMKEVIDAFISENGWVEDYGSGSPAAKRVKLDYPYDVPDYA

SEQ ID NO: 728 - protein, 250 aa, synthetic construct
  source 1..250: note = TCF4-(GS)3-CHIP-NLS-HA peptide
MDDLGANDELISFKDEGEQEEKSSENSSAERDLADVKSSLVNESETGSGSGSRLNFGDDIPSALRIAKKKRWNSIEERRIHQESELHSYLSRLIAAERERELEECQRNHEGDEDDSHVRAQQACIEAKHDKYMADMDELFSQVDEKRKKRDIPDYLCGKISFELMREPCITPSGITYDRKDIEEHLQRVGHFDPVTRSPLTQEQLIPNLAMKEVIDAFISENGWVEDYGSGSPAAKRVKLDYPYDVPDYA

SEQ ID NO: 729 - protein, 252 aa, synthetic construct
  source 1..252: note = TCF4-(GS)4-CHIP-NLS-HA peptide
MDDLGANDELISFKDEGEQEEKSSENSSAERDLADVKSSLVNESETGSGSGSGSRLNFGDDIPSALRIAKKKRWNSIEERRIHQESELHSYLSRLIAAERERELEECQRNHEGDEDDSHVRAQQACIEAKHDKYMADMDELFSQVDEKRKKRDIPDYLCGKISFELMREPCITPSGITYDRKDIEEHLQRVGHFDPVTRSPLTQEQLIPNLAMKEVIDAFISENGWVEDYGSGSPAAKRVKLDYPYDVPDYA

SEQ ID NO: 730 - protein, 254 aa, synthetic construct
  source 1..254: note = TCF4-(GS)5-CHIP-NLS-HA peptide
MDDLGANDELISFKDEGEQEEKSSENSSAERDLADVKSSLVNESETGSGSGSGSGSRLNFGDDIPSALRIAKKKRWNSIEERRIHQESELHSYLSRLIAAERERELEECQRNHEGDEDDSHVRAQQACIEAKHDKYMADMDELFSQVDEKRKKRDIPDYLCGKISFELMREPCITPSGITYDRKDIEEHLQRVGHFDPVTRSPLTQEQLIPNLAMKEVIDAFISENGWVEDYGSGSPAAKRVKLDYPYDVPDYA

SEQ ID NO: 731 - protein, 256 aa, synthetic construct
  source 1..256: note = TCF4-(GS)6-CHIP-NLS-HA peptide
MDDLGANDELISFKDEGEQEEKSSENSSAERDLADVKSSLVNESETGSGSGSGSGSGSRLNFGDDIPSALRIAKKKRWNSIEERRIHQESELHSYLSRLIAAERERELEECQRNHEGDEDDSHVRAQQACIEAKHDKYMADMDELFSQVDEKRKKRDIPDYLCGKISFELMREPCITPSGITYDRKDIEEHLQRVGHFDPVTRSPLTQEQLIPNLAMKEVIDAFISENGWVEDYGSGSPAAKRVKLDYPYDVPDYA

SEQ ID NO: 732 - protein, 97 aa, synthetic construct
  source 1..97: note = NLS-DCAF1-(GS)1-TCF4 peptide
PAAKRVKLDGSGSGSQAPINFTSRLNRRASFPKYGGVDGGCFDRHLIFSRGSDDLGANDELISFKDEGEQEEKSSENSSAERDLADVKSSLVNESET

SEQ ID NO: 733 - protein, 99 aa, synthetic construct
  source 1..99: note = NLS-DCAF1-(GS)2-TCF4 peptide
PAAKRVKLDGSGSGSQAPINFTSRLNRRASFPKYGGVDGGCFDRHLIFSRGSGSDDLGANDELISFKDEGEQEEKSSENSSAERDLADVKSSLVNESET

SEQ ID NO: 734 - protein, 101 aa, synthetic construct
  source 1..101: note = NLS-DCAF1-(GS)3-TCF4 peptide
PAAKRVKLDGSGSGSQAPINFTSRLNRRASFPKYGGVDGGCFDRHLIFSRGSGSGSDDLGANDELISFKDEGEQEEKSSENSSAERDLADVKSSLVNESET

SEQ ID NO: 735 - protein, 103 aa, synthetic construct
  source 1..103: note = NLS-DCAF1-(GS)4-TCF4 peptide
PAAKRVKLDGSGSGSQAPINFTSRLNRRASFPKYGGVDGGCFDRHLIFSRGSGSGSGSDDLGANDELISFKDEGEQEEKSSENSSAERDLADVKSSLVNESET

SEQ ID NO: 736 - protein, 105 aa, synthetic construct
  source 1..105: note = NLS-DCAF1-(GS)5-TCF4 peptide
PAAKRVKLDGSGSGSQAPINFTSRLNRRASFPKYGGVDGGCFDRHLIFSRGSGSGSGSGSDDLGANDELISFKDEGEQEEKSSENSSAERDLADVKSSLVNESET

SEQ ID NO: 737 - protein, 107 aa, synthetic construct
  source 1..107: note = NLS-DCAF1-(GS)6-TCF4 peptide
PAAKRVKLDGSGSGSQAPINFTSRLNRRASFPKYGGVDGGCFDRHLIFSRGSGSGSGSGSGSDDLGANDELISFKDEGEQEEKSSENSSAERDLADVKSSLVNESET

SEQ ID NO: 738 - protein, 107 aa, synthetic construct
  source 1..107: note = HA-NLS-DCAF1-(GS)1-TCF4 peptide
MYPYDVPDYAPAAKRVKLDGSGSGSQAPINFTSRLNRRASFPKYGGVDGGCFDRHLIFSRGSDDLGANDELISFKDEGEQEEKSSENSSAERDLADVKSSLVNESET

SEQ ID NO: 739 - protein, 109 aa, synthetic construct
  source 1..109: note = HA-NLS-DCAF1-(GS)2-TCF4 peptide
MYPYDVPDYAPAAKRVKLDGSGSGSQAPINFTSRLNRRASFPKYGGVDGGCFDRHLIFSRGSGSDDLGANDELISFKDEGEQEEKSSENSSAERDLADVKSSLVNESET

SEQ ID NO: 740 - protein, 111 aa, synthetic construct
  source 1..111: note = HA-NLS-DCAF1-(GS)3-TCF4 peptide
MYPYDVPDYAPAAKRVKLDGSGSGSQAPINFTSRLNRRASFPKYGGVDGGCFDRHLIFSRGSGSGSDDLGANDELISFKDEGEQEEKSSENSSAERDLADVKSSLVNESET

SEQ ID NO: 741 - protein, 113 aa, synthetic construct
  source 1..113: note = HA-NLS-DCAF1-(GS)4-TCF4 peptide
MYPYDVPDYAPAAKRVKLDGSGSGSQAPINFTSRLNRRASFPKYGGVDGGCFDRHLIFSRGSGSGSGSDDLGANDELISFKDEGEQEEKSSENSSAERDLADVKSSLVNESET

SEQ ID NO: 742 - protein, 115 aa, synthetic construct
  source 1..115: note = HA-NLS-DCAF1-(GS)5-TCF4 peptide
MYPYDVPDYAPAAKRVKLDGSGSGSQAPINFTSRLNRRASFPKYGGVDGGCFDRHLIFSRGSGSGSGSGSDDLGANDELISFKDEGEQEEKSSENSSAERDLADVKSSLVNESET

SEQ ID NO: 743 - protein, 117 aa, synthetic construct
  source 1..117: note = HA-NLS-DCAF1-(GS)6-TCF4 peptide
MYPYDVPDYAPAAKRVKLDGSGSGSQAPINFTSRLNRRASFPKYGGVDGGCFDRHLIFSRGSGSGSGSGSGSDDLGANDELISFKDEGEQEEKSSENSSAERDLADVKSSLVNESET

SEQ ID NO: 744 - protein, 418 aa, synthetic construct
  source 1..418: note = NLS-TCF4-(GS)1-E6AP peptide
PAAKRVKLDGSGSGSDDLGANDELISFKDEGEQEEKSSENSSAERDLADVKSSLVNESETGSNPYLRLKVRRDHIIDDALVRLEMIAMENPADLKKQLYVEFEGEQGVDEGGVSKEFFQLVVEEIFNPDIGMFTYDESTKLFWFNPSSFETEGQFTLIGIVLGLAIYNNCILDVHFPMVVYRKLMGKKGTFRDLGDSHPVLYQSLKDLLEYEGNVEDDMMITFQISQTDLFGNPMMYDLKENGDKIPITNENRKEFVNLYSDYILNKSVEKQFKAFRRGFHMVTNESPLKYLFRPEEIELLICGSRNLDFQALEETTEYDGGYTRDSVLIREFWEIVHSFTDEQKRLFLQFTTGTDRAPVGGLGKLKMIIAKNGPDTERLPTSHTCFNVLLLPEYSSKEKLKERLLKAITYAKGFGML

SEQ ID NO: 745 - protein, 420 aa, synthetic construct
  source 1..420: note = NLS-TCF4-(GS)2-E6AP peptide
PAAKRVKLDGSGSGSDDLGANDELISFKDEGEQEEKSSENSSAERDLADVKSSLVNESETGSGSNPYLRLKVRRDHIIDDALVRLEMIAMENPADLKKQLYVEFEGEQGVDEGGVSKEFFQLVVEEIFNPDIGMFTYDESTKLFWFNPSSFETEGQFTLIGIVLGLAIYNNCILDVHFPMVVYRKLMGKKGTFRDLGDSHPVLYQSLKDLLEYEGNVEDDMMITFQISQTDLFGNPMMYDLKENGDKIPITNENRKEFVNLYSDYILNKSVEKQFKAFRRGFHMVTNESPLKYLFRPEEIELLICGSRNLDFQALEETTEYDGGYTRDSVLIREFWEIVHSFTDEQKRLFLQFTTGTDRAPVGGLGKLKMIIAKNGPDTERLPTSHTCFNVLLLPEYSSKEKLKERLLKAITYAKGFGML

SEQ ID NO: 746 - protein, 422 aa, synthetic construct
  source 1..422: note = NLS-TCF4(GS)3-E6AP peptide
PAAKRVKLDGSGSGSDDLGANDELISFKDEGEQEEKSSENSSAERDLADVKSSLVNESETGSGSGSNPYLRLKVRRDHIIDDALVRLEMIAMENPADLKKQLYVEFEGEQGVDEGGVSKEFFQLVVEEIFNPDIGMFTYDESTKLFWFNPSSFETEGQFTLIGIVLGLAIYNNCILDVHFPMVVYRKLMGKKGTFRDLGDSHPVLYQSLKDLLEYEGNVEDDMMITFQISQTDLFGNPMMYDLKENGDKIPITNENRKEFVNLYSDYILNKSVEKQFKAFRRGFHMVTNESPLKYLFRPEEIELLICGSRNLDFQALEETTEYDGGYTRDSVLIREFWEIVHSFTDEQKRLFLQFTTGTDRAPVGGLGKLKMIIAKNGPDTERLPTSHTCFNVLLLPEYSSKEKLKERLLKAITYAKGFGML

SEQ ID NO: 747 - protein, 424 aa, synthetic construct
  source 1..424: note = NLS-TCF4-(GS)4-E6AP peptide
PAAKRVKLDGSGSGSDDLGANDELISFKDEGEQEEKSSENSSAERDLADVKSSLVNESETGSGSGSGSNPYLRLKVRRDHIIDDALVRLEMIAMENPADLKKQLYVEFEGEQGVDEGGVSKEFFQLVVEEIFNPDIGMFTYDESTKLFWFNPSSFETEGQFTLIGIVLGLAIYNNCILDVHFPMVVYRKLMGKKGTFRDLGDSHPVLYQSLKDLLEYEGNVEDDMMITFQISQTDLFGNPMMYDLKENGDKIPITNENRKEFVNLYSDYILNKSVEKQFKAFRRGFHMVTNESPLKYLFRPEEIELLICGSRNLDFQALEETTEYDGGYTRDSVLIREFWEIVHSFTDEQKRLFLQFTTGTDRAPVGGLGKLKMIIAKNGPDTERLPTSHTCFNVLLLPEYSSKEKLKERLLKAITYAKGFGML

SEQ ID NO: 748 - protein, 426 aa, synthetic construct
  source 1..426: note = NLS-TCF4-(GS)5-E6AP peptide
PAAKRVKLDGSGSGSDDLGANDELISFKDEGEQEEKSSENSSAERDLADVKSSLVNESETGSGSGSGSGSNPYLRLKVRRDHIIDDALVRLEMIAMENPADLKKQLYVEFEGEQGVDEGGVSKEFFQLVVEEIFNPDIGMFTYDESTKLFWFNPSSFETEGQFTLIGIVLGLAIYNNCILDVHFPMVVYRKLMGKKGTFRDLGDSHPVLYQSLKDLLEYEGNVEDDMMITFQISQTDLFGNPMMYDLKENGDKIPITNENRKEFVNLYSDYILNKSVEKQFKAFRRGFHMVTNESPLKYLFRPEEIELLICGSRNLDFQALEETTEYDGGYTRDSVLIREFWEIVHSFTDEQKRLFLQFTTGTDRAPVGGLGKLKMIIAKNGPDTERLPTSHTCFNVLLLPEYSSKEKLKERLLKAITYAKGFGML

SEQ ID NO: 749 - protein, 428 aa, synthetic construct
  source 1..428: note = NLS-TCF4-(GS)6-E6AP peptide
PAAKRVKLDGSGSGSDDLGANDELISFKDEGEQEEKSSENSSAERDLADVKSSLVNESETGSGSGSGSGSGSNPYLRLKVRRDHIIDDALVRLEMIAMENPADLKKQLYVEFEGEQGVDEGGVSKEFFQLVVEEIFNPDIGMFTYDESTKLFWFNPSSFETEGQFTLIGIVLGLAIYNNCILDVHFPMVVYRKLMGKKGTFRDLGDSHPVLYQSLKDLLEYEGNVEDDMMITFQISQTDLFGNPMMYDLKENGDKIPITNENRKEFVNLYSDYILNKSVEKQFKAFRRGFHMVTNESPLKYLFRPEEIELLICGSRNLDFQALEETTEYDGGYTRDSVLIREFWEIVHSFTDEQKRLFLQFTTGTDRAPVGGLGKLKMIIAKNGPDTERLPTSHTCFNVLLLPEYSSKEKLKERLLKAITYAKGFGML

SEQ ID NO: 750 - protein, 428 aa, synthetic construct
  source 1..428: note = HA-NLS-TCF4-(GS)1-E6AP peptide
MYPYDVPDYAPAAKRVKLDGSGSGSDDLGANDELISFKDEGEQEEKSSENSSAERDLADVKSSLVNESETGSNPYLRLKVRRDHIIDDALVRLEMIAMENPADLKKQLYVEFEGEQGVDEGGVSKEFFQLVVEEIFNPDIGMFTYDESTKLFWFNPSSFETEGQFTLIGIVLGLAIYNNCILDVHFPMVVYRKLMGKKGTFRDLGDSHPVLYQSLKDLLEYEGNVEDDMMITFQISQTDLFGNPMMYDLKENGDKIPITNENRKEFVNLYSDYILNKSVEKQFKAFRRGFHMVTNESPLKYLFRPEEIELLICGSRNLDFQALEETTEYDGGYTRDSVLIREFWEIVHSFTDEQKRLFLQFTTGTDRAPVGGLGKLKMIIAKNGPDTERLPTSHTCFNVLLLPEYSSKEKLKERLLKAITYAKGFGML

SEQ ID NO: 751 - protein, 430 aa, synthetic construct
  source 1..430: note = HA-NLS-TCF4-(GS)2-E6AP peptide
MYPYDVPDYAPAAKRVKLDGSGSGSDDLGANDELISFKDEGEQEEKSSENSSAERDLADVKSSLVNESETGSGSNPYLRLKVRRDHIIDDALVRLEMIAMENPADLKKQLYVEFEGEQGVDEGGVSKEFFQLVVEEIFNPDIGMFTYDESTKLFWFNPSSFETEGQFTLIGIVLGLAIYNNCILDVHFPMVVYRKLMGKKGTFRDLGDSHPVLYQSLKDLLEYEGNVEDDMMITFQISQTDLFGNPMMYDLKENGDKIPITNENRKEFVNLYSDYILNKSVEKQFKAFRRGFHMVTNESPLKYLFRPEEIELLICGSRNLDFQALEETTEYDGGYTRDSVLIREFWEIVHSFTDEQKRLFLQFTTGTDRAPVGGLGKLKMIIAKNGPDTERLPTSHTCFNVLLLPEYSSKEKLKERLLKAITYAKGFGML

SEQ ID NO: 752 - protein, 432 aa, synthetic construct
  source 1..432: note = HA-NLS-TCF4(GS)3-E6AP peptide
MYPYDVPDYAPAAKRVKLDGSGSGSDDLGANDELISFKDEGEQEEKSSENSSAERDLADVKSSLVNESETGSGSGSNPYLRLKVRRDHIIDDALVRLEMIAMENPADLKKQLYVEFEGEQGVDEGGVSKEFFQLVVEEIFNPDIGMFTYDESTKLFWFNPSSFETEGQFTLIGIVLGLAIYNNCILDVHFPMVVYRKLMGKKGTFRDLGDSHPVLYQSLKDLLEYEGNVEDDMMITFQISQTDLFGNPMMYDLKENGDKIPITNENRKEFVNLYSDYILNKSVEKQFKAFRRGFHMVTNESPLKYLFRPEEIELLICGSRNLDFQALEETTEYDGGYTRDSVLIREFWEIVHSFTDEQKRLFLQFTTGTDRAPVGGLGKLKMIIAKNGPDTERLPTSHTCFNVLLLPEYSSKEKLKERLLKAITYAKGFGML

SEQ ID NO: 753 - protein, 434 aa, synthetic construct
  source 1..434: note = HA-NLS-TCF4-(GS)4-E6AP peptide
MYPYDVPDYAPAAKRVKLDGSGSGSDDLGANDELISFKDEGEQEEKSSENSSAERDLADVKSSLVNESETGSGSGSGSNPYLRLKVRRDHIIDDALVRLEMIAMENPADLKKQLYVEFEGEQGVDEGGVSKEFFQLVVEEIFNPDIGMFTYDESTKLFWFNPSSFETEGQFTLIGIVLGLAIYNNCILDVHFPMVVYRKLMGKKGTFRDLGDSHPVLYQSLKDLLEYEGNVEDDMMITFQISQTDLFGNPMMYDLKENGDKIPITNENRKEFVNLYSDYILNKSVEKQFKAFRRGFHMVTNESPLKYLFRPEEIELLICGSRNLDFQALEETTEYDGGYTRDSVLIREFWEIVHSFTDEQKRLFLQFTTGTDRAPVGGLGKLKMIIAKNGPDTERLPTSHTCFNVLLLPEYSSKEKLKERLLKAITYAKGFGML

SEQ ID NO: 754 - protein, 436 aa, synthetic construct
  source 1..436: note = HA-NLS-TCF4-(GS)5-E6AP peptide
MYPYDVPDYAPAAKRVKLDGSGSGSDDLGANDELISFKDEGEQEEKSSENSSAERDLADVKSSLVNESETGSGSGSGSGSNPYLRLKVRRDHIIDDALVRLEMIAMENPADLKKQLYVEFEGEQGVDEGGVSKEFFQLVVEEIFNPDIGMFTYDESTKLFWFNPSSFETEGQFTLIGIVLGLAIYNNCILDVHFPMVVYRKLMGKKGTFRDLGDSHPVLYQSLKDLLEYEGNVEDDMMITFQISQTDLFGNPMMYDLKENGDKIPITNENRKEFVNLYSDYILNKSVEKQFKAFRRGFHMVTNESPLKYLFRPEEIELLICGSRNLDFQALEETTEYDGGYTRDSVLIREFWEIVHSFTDEQKRLFLQFTTGTDRAPVGGLGKLKMIIAKNGPDTERLPTSHTCFNVLLLPEYSSKEKLKERLLKAITYAKGFGML

SEQ ID NO: 755 - protein, 438 aa, synthetic construct
  source 1..438: note = HA-NLS-TCF4-(GS)6-E6AP peptide
MYPYDVPDYAPAAKRVKLDGSGSGSDDLGANDELISFKDEGEQEEKSSENSSAERDLADVKSSLVNESETGSGSGSGSGSGSNPYLRLKVRRDHIIDDALVRLEMIAMENPADLKKQLYVEFEGEQGVDEGGVSKEFFQLVVEEIFNPDIGMFTYDESTKLFWFNPSSFETEGQFTLIGIVLGLAIYNNCILDVHFPMVVYRKLMGKKGTFRDLGDSHPVLYQSLKDLLEYEGNVEDDMMITFQISQTDLFGNPMMYDLKENGDKIPITNENRKEFVNLYSDYILNKSVEKQFKAFRRGFHMVTNESPLKYLFRPEEIELLICGSRNLDFQALEETTEYDGGYTRDSVLIREFWEIVHSFTDEQKRLFLQFTTGTDRAPVGGLGKLKMIIAKNGPDTERLPTSHTCFNVLLLPEYSSKEKLKERLLKAITYAKGFGML

SEQ ID NO: 756 - protein, 414 aa, synthetic construct
  source 1..414: note = FBXW7a-(GS)1-TCF4 peptide
NQELLSVGSKRRRTGGSLRGNPSSSQVDEEQMNRVVEEEQQQQLRQQEEEHTARNGEVVGVEPRPGGQNDSQQGQLEENNNRFISVDEDSSGNQEEQEEDEEHAGEQDEEDEEEEEMDQESDDFDQSDDSSREDEHTHTNSVTNSSSIVDLPVHQLSSPFYTKTTKMKRKLDHGSEVRSFSLGKKPCKVSEYTSTTGLVPCSATPTTFGDLRAANGQGQQRRRITSVQPPTGLQEWLKMFQSWSGPEKLLALDELIDSCEPTQVKHMMQVIEPQFQRDFISLLPKELALYVLSFLEPKDLLQAAQTCRYWRILAEDNLLWREKCKEEGIDEPLHIKRRKVIKPGFIHSPWKSAYIRQHRIDTNSRRGGSDDLGANDELISFKDEGEQEEKSSENSSAERDLADVKSSLVNESET

SEQ ID NO: 757 - protein, 416 aa, synthetic construct
  source 1..416: note = FBXW7a-(GS)2-TCF4 peptide
NQELLSVGSKRRRTGGSLRGNPSSSQVDEEQMNRVVEEEQQQQLRQQEEEHTARNGEVVGVEPRPGGQNDSQQGQLEENNNRFISVDEDSSGNQEEQEEDEEHAGEQDEEDEEEEEMDQESDDFDQSDDSSREDEHTHTNSVTNSSSIVDLPVHQLSSPFYTKTTKMKRKLDHGSEVRSFSLGKKPCKVSEYTSTTGLVPCSATPTTFGDLRAANGQGQQRRRITSVQPPTGLQEWLKMFQSWSGPEKLLALDELIDSCEPTQVKHMMQVIEPQFQRDFISLLPKELALYVLSFLEPKDLLQAAQTCRYWRILAEDNLLWREKCKEEGIDEPLHIKRRKVIKPGFIHSPWKSAYIRQHRIDTNSRRGGSGSDDLGANDELISFKDEGEQEEKSSENSSAERDLADVKSSLVNESET

SEQ ID NO: 758 - protein, 418 aa, synthetic construct
  source 1..418: note = FBXW7a-(GS)3-TCF4 peptide
NQELLSVGSKRRRTGGSLRGNPSSSQVDEEQMNRVVEEEQQQQLRQQEEEHTARNGEVVGVEPRPGGQNDSQQGQLEENNNRFISVDEDSSGNQEEQEEDEEHAGEQDEEDEEEEEMDQESDDFDQSDDSSREDEHTHTNSVTNSSSIVDLPVHQLSSPFYTKTTKMKRKLDHGSEVRSFSLGKKPCKVSEYTSTTGLVPCSATPTTFGDLRAANGQGQQRRRITSVQPPTGLQEWLKMFQSWSGPEKLLALDELIDSCEPTQVKHMMQVIEPQFQRDFISLLPKELALYVLSFLEPKDLLQAAQTCRYWRILAEDNLLWREKCKEEGIDEPLHIKRRKVIKPGFIHSPWKSAYIRQHRIDTNSRRGGSGSGSDDLGANDELISFKDEGEQEEKSSENSSAERDLADVKSSLVNESET

SEQ ID NO: 759 - protein, 420 aa, synthetic construct
  source 1..420: note = FBXW7a-(GS)4-TCF4 peptide
NQELLSVGSKRRRTGGSLRGNPSSSQVDEEQMNRVVEEEQQQQLRQQEEEHTARNGEVVGVEPRPGGQNDSQQGQLEENNNRFISVDEDSSGNQEEQEEDEEHAGEQDEEDEEEEEMDQESDDFDQSDDSSREDEHTHTNSVTNSSSIVDLPVHQLSSPFYTKTTKMKRKLDHGSEVRSFSLGKKPCKVSEYTSTTGLVPCSATPTTFGDLRAANGQGQQRRRITSVQPPTGLQEWLKMFQSWSGPEKLLALDELIDSCEPTQVKHMMQVIEPQFQRDFISLLPKELALYVLSFLEPKDLLQAAQTCRYWRILAEDNLLWREKCKEEGIDEPLHIKRRKVIKPGFIHSPWKSAYIRQHRIDTNSRRGGSGSGSGSDDLGANDELISFKDEGEQEEKSSENSSAERDLADVKSSLVNESET

SEQ ID NO: 760 - protein, 422 aa, synthetic construct
  source 1..422: note = FBXW7a-(GS)5-TCF4 peptide
NQELLSVGSKRRRTGGSLRGNPSSSQVDEEQMNRVVEEEQQQQLRQQEEEHTARNGEVVGVEPRPGGQNDSQQGQLEENNNRFISVDEDSSGNQEEQEEDEEHAGEQDEEDEEEEEMDQESDDFDQSDDSSREDEHTHTNSVTNSSSIVDLPVHQLSSPFYTKTTKMKRKLDHGSEVRSFSLGKKPCKVSEYTSTTGLVPCSATPTTFGDLRAANGQGQQRRRITSVQPPTGLQEWLKMFQSWSGPEKLLALDELIDSCEPTQVKHMMQVIEPQFQRDFISLLPKELALYVLSFLEPKDLLQAAQTCRYWRILAEDNLLWREKCKEEGIDEPLHIKRRKVIKPGFIHSPWKSAYIRQHRIDTNSRRGGSGSGSGSGSDDLGANDELISFKDEGEQEEKSSENSSAERDLADVKSSLVNESET

SEQ ID NO: 761 - protein, 424 aa, synthetic construct
  source 1..424: note = FBXW7a-(GS)6-TCF4 peptide
NQELLSVGSKRRRTGGSLRGNPSSSQVDEEQMNRVVEEEQQQQLRQQEEEHTARNGEVVGVEPRPGGQNDSQQGQLEENNNRFISVDEDSSGNQEEQEEDEEHAGEQDEEDEEEEEMDQESDDFDQSDDSSREDEHTHTNSVTNSSSIVDLPVHQLSSPFYTKTTKMKRKLDHGSEVRSFSLGKKPCKVSEYTSTTGLVPCSATPTTFGDLRAANGQGQQRRRITSVQPPTGLQEWLKMFQSWSGPEKLLALDELIDSCEPTQVKHMMQVIEPQFQRDFISLLPKELALYVLSFLEPKDLLQAAQTCRYWRILAEDNLLWREKCKEEGIDEPLHIKRRKVIKPGFIHSPWKSAYIRQHRIDTNSRRGGSGSGSGSGSGSDDLGANDELISFKDEGEQEEKSSENSSAERDLADVKSSLVNESET

SEQ ID NO: 762 - protein, 424 aa, synthetic construct
  source 1..424: note = HA-FBXW7a-(GS)1-TCF4 peptide
MYPYDVPDYANQELLSVGSKRRRTGGSLRGNPSSSQVDEEQMNRVVEEEQQQQLRQQEEEHTARNGEVVGVEPRPGGQNDSQQGQLEENNNRFISVDEDSSGNQEEQEEDEEHAGEQDEEDEEEEEMDQESDDFDQSDDSSREDEHTHTNSVTNSSSIVDLPVHQLSSPFYTKTTKMKRKLDHGSEVRSFSLGKKPCKVSEYTSTTGLVPCSATPTTFGDLRAANGQGQQRRRITSVQPPTGLQEWLKMFQSWSGPEKLLALDELIDSCEPTQVKHMMQVIEPQFQRDFISLLPKELALYVLSFLEPKDLLQAAQTCRYWRILAEDNLLWREKCKEEGIDEPLHIKRRKVIKPGFIHSPWKSAYIRQHRIDTNSRRGGSDDLGANDELISFKDEGEQEEKSSENSSAERDLADVKSSLVNESET

SEQ ID NO: 763 - protein, 426 aa, synthetic construct
  source 1..426: note = HA-FBXW7a-(GS)2-TCF4 peptide
MYPYDVPDYANQELLSVGSKRRRTGGSLRGNPSSSQVDEEQMNRVVEEEQQQQLRQQEEEHTARNGEVVGVEPRPGGQNDSQQGQLEENNNRFISVDEDSSGNQEEQEEDEEHAGEQDEEDEEEEEMDQESDDFDQSDDSSREDEHTHTNSVTNSSSIVDLPVHQLSSPFYTKTTKMKRKLDHGSEVRSFSLGKKPCKVSEYTSTTGLVPCSATPTTFGDLRAANGQGQQRRRITSVQPPTGLQEWLKMFQSWSGPEKLLALDELIDSCEPTQVKHMMQVIEPQFQRDFISLLPKELALYVLSFLEPKDLLQAAQTCRYWRILAEDNLLWREKCKEEGIDEPLHIKRRKVIKPGFIHSPWKSAYIRQHRIDTNSRRGGSGSDDLGANDELISFKDEGEQEEKSSENSSAERDLADVKSSLVNESET

SEQ ID NO: 764 - protein, 428 aa, synthetic construct
  source 1..428: note = HA-FBXW7a-(GS)3-TCF4 peptide
MYPYDVPDYANQELLSVGSKRRRTGGSLRGNPSSSQVDEEQMNRVVEEEQQQQLRQQEEEHTARNGEVVGVEPRPGGQNDSQQGQLEENNNRFISVDEDSSGNQEEQEEDEEHAGEQDEEDEEEEEMDQESDDFDQSDDSSREDEHTHTNSVTNSSSIVDLPVHQLSSPFYTKTTKMKRKLDHGSEVRSFSLGKKPCKVSEYTSTTGLVPCSATPTTFGDLRAANGQGQQRRRITSVQPPTGLQEWLKMFQSWSGPEKLLALDELIDSCEPTQVKHMMQVIEPQFQRDFISLLPKELALYVLSFLEPKDLLQAAQTCRYWRILAEDNLLWREKCKEEGIDEPLHIKRRKVIKPGFIHSPWKSAYIRQHRIDTNSRRGGSGSGSDDLGANDELISFKDEGEQEEKSSENSSAERDLADVKSSLVNESET

SEQ ID NO: 765 - protein, 430 aa, synthetic construct
  source 1..430: note = HA-FBXW7a-(GS)4-TCF4 peptide
MYPYDVPDYANQELLSVGSKRRRTGGSLRGNPSSSQVDEEQMNRVVEEEQQQQLRQQEEEHTARNGEVVGVEPRPGGQNDSQQGQLEENNNRFISVDEDSSGNQEEQEEDEEHAGEQDEEDEEEEEMDQESDDFDQSDDSSREDEHTHTNSVTNSSSIVDLPVHQLSSPFYTKTTKMKRKLDHGSEVRSFSLGKKPCKVSEYTSTTGLVPCSATPTTFGDLRAANGQGQQRRRITSVQPPTGLQEWLKMFQSWSGPEKLLALDELIDSCEPTQVKHMMQVIEPQFQRDFISLLPKELALYVLSFLEPKDLLQAAQTCRYWRILAEDNLLWREKCKEEGIDEPLHIKRRKVIKPGFIHSPWKSAYIRQHRIDTNSRRGGSGSGSGSDDLGANDELISFKDEGEQEEKSSENSSAERDLADVKSSLVNESET

SEQ ID NO: 766 - protein, 432 aa, synthetic construct
  source 1..432: note = HA-FBXW7a-(GS)5-TCF4 peptide
MYPYDVPDYANQELLSVGSKRRRTGGSLRGNPSSSQVDEEQMNRVVEEEQQQQLRQQEEEHTARNGEVVGVEPRPGGQNDSQQGQLEENNNRFISVDEDSSGNQEEQEEDEEHAGEQDEEDEEEEEMDQESDDFDQSDDSSREDEHTHTNSVTNSSSIVDLPVHQLSSPFYTKTTKMKRKLDHGSEVRSFSLGKKPCKVSEYTSTTGLVPCSATPTTFGDLRAANGQGQQRRRITSVQPPTGLQEWLKMFQSWSGPEKLLALDELIDSCEPTQVKHMMQVIEPQFQRDFISLLPKELALYVLSFLEPKDLLQAAQTCRYWRILAEDNLLWREKCKEEGIDEPLHIKRRKVIKPGFIHSPWKSAYIRQHRIDTNSRRGGSGSGSGSGSDDLGANDELISFKDEGEQEEKSSENSSAERDLADVKSSLVNESET

SEQ ID NO: 767 - protein, 434 aa, synthetic construct
  source 1..434: note = HA-FBXW7a-(GS)6-TCF4 peptide
MYPYDVPDYANQELLSVGSKRRRTGGSLRGNPSSSQVDEEQMNRVVEEEQQQQLRQQEEEHTARNGEVVGVEPRPGGQNDSQQGQLEENNNRFISVDEDSSGNQEEQEEDEEHAGEQDEEDEEEEEMDQESDDFDQSDDSSREDEHTHTNSVTNSSSIVDLPVHQLSSPFYTKTTKMKRKLDHGSEVRSFSLGKKPCKVSEYTSTTGLVPCSATPTTFGDLRAANGQGQQRRRITSVQPPTGLQEWLKMFQSWSGPEKLLALDELIDSCEPTQVKHMMQVIEPQFQRDFISLLPKELALYVLSFLEPKDLLQAAQTCRYWRILAEDNLLWREKCKEEGIDEPLHIKRRKVIKPGFIHSPWKSAYIRQHRIDTNSRRGGSGSGSGSGSGSDDLGANDELISFKDEGEQEEKSSENSSAERDLADVKSSLVNESET

SEQ ID NO: 768 - protein, 383 aa, synthetic construct
  source 1..383: note = NLS-Keap1-(GS)1-TCF4 peptide
PAAKRVKLDGSGSGSQPDPRPSGAGACCRFLPLQSQCPEGAGDAVMYASTECKAEVTPSQHGNRTFSYTLEDHTKQAFGIMNELRLSQQLCDVTLQVKYQDAPAAQFMAHKVVLASSSPVFKAMFTNGLREQGMEVVSIEGIHPKVMERLIEFAYTASISMGEKCVLHVMNGAVMYQIDSVVRACSDFLVQQLDPSNAIGIANFAEQIGCVELHQRAREYIYMHFGEVAKQEEFFNLSHCQLVTLISRDDLNVRCESEVFHACINWVKYDCEQRRFYVQALLRAVRCHSLTPNFLQMQLQKCEILQSDSRCKDYLVKIFEELTLHKPTQVMPCRAPGSDDLGANDELISFKDEGEQEEKSSENSSAERDLADVKSSLVNESET

SEQ ID NO: 769 - protein, 385 aa, synthetic construct
  source 1..385: note = NLS-Keap1-(GS)2-TCF4 peptide
PAAKRVKLDGSGSGSQPDPRPSGAGACCRFLPLQSQCPEGAGDAVMYASTECKAEVTPSQHGNRTFSYTLEDHTKQAFGIMNELRLSQQLCDVTLQVKYQDAPAAQFMAHKVVLASSSPVFKAMFTNGLREQGMEVVSIEGIHPKVMERLIEFAYTASISMGEKCVLHVMNGAVMYQIDSVVRACSDFLVQQLDPSNAIGIANFAEQIGCVELHQRAREYIYMHFGEVAKQEEFFNLSHCQLVTLISRDDLNVRCESEVFHACINWVKYDCEQRRFYVQALLRAVRCHSLTPNFLQMQLQKCEILQSDSRCKDYLVKIFEELTLHKPTQVMPCRAPGSGSDDLGANDELISFKDEGEQEEKSSENSSAERDLADVKSSLVNESET

SEQ ID NO: 770 - protein, 387 aa, synthetic construct
  source 1..387: note = NLS-Keap1-(GS)3-TCF4 peptide
PAAKRVKLDGSGSGSQPDPRPSGAGACCRFLPLQSQCPEGAGDAVMYASTECKAEVTPSQHGNRTFSYTLEDHTKQAFGIMNELRLSQQLCDVTLQVKYQDAPAAQFMAHKVVLASSSPVFKAMFTNGLREQGMEVVSIEGIHPKVMERLIEFAYTASISMGEKCVLHVMNGAVMYQIDSVVRACSDFLVQQLDPSNAIGIANFAEQIGCVELHQRAREYIYMHFGEVAKQEEFFNLSHCQLVTLISRDDLNVRCESEVFHACINWVKYDCEQRRFYVQALLRAVRCHSLTPNFLQMQLQKCEILQSDSRCKDYLVKIFEELTLHKPTQVMPCRAPGSGSGSDDLGANDELISFKDEGEQEEKSSENSSAERDLADVKSSLVNESET

SEQ ID NO: 771 - protein, 389 aa, synthetic construct
  source 1..389: note = NLS-Keap1-(GS)4-TCF4 peptide
PAAKRVKLDGSGSGSQPDPRPSGAGACCRFLPLQSQCPEGAGDAVMYASTECKAEVTPSQHGNRTFSYTLEDHTKQAFGIMNELRLSQQLCDVTLQVKYQDAPAAQFMAHKVVLASSSPVFKAMFTNGLREQGMEVVSIEGIHPKVMERLIEFAYTASISMGEKCVLHVMNGAVMYQIDSVVRACSDFLVQQLDPSNAIGIANFAEQIGCVELHQRAREYIYMHFGEVAKQEEFFNLSHCQLVTLISRDDLNVRCESEVFHACINWVKYDCEQRRFYVQALLRAVRCHSLTPNFLQMQLQKCEILQSDSRCKDYLVKIFEELTLHKPTQVMPCRAPGSGSGSGSDDLGANDELISFKDEGEQEEKSSENSSAERDLADVKSSLVNESET

SEQ ID NO: 772 - protein, 391 aa, synthetic construct
  source 1..391: note = NLS-Keap1-(GS)5-TCF4 peptide
PAAKRVKLDGSGSGSQPDPRPSGAGACCRFLPLQSQCPEGAGDAVMYASTECKAEVTPSQHGNRTFSYTLEDHTKQAFGIMNELRLSQQLCDVTLQVKYQDAPAAQFMAHKVVLASSSPVFKAMFTNGLREQGMEVVSIEGIHPKVMERLIEFAYTASISMGEKCVLHVMNGAVMYQIDSVVRACSDFLVQQLDPSNAIGIANFAEQIGCVELHQRAREYIYMHFGEVAKQEEFFNLSHCQLVTLISRDDLNVRCESEVFHACINWVKYDCEQRRFYVQALLRAVRCHSLTPNFLQMQLQKCEILQSDSRCKDYLVKIFEELTLHKPTQVMPCRAPGSGSGSGSGSDDLGANDELISFKDEGEQEEKSSENSSAERDLADVKSSLVNESET

SEQ ID NO: 773 - protein, 393 aa, synthetic construct
  source 1..393: note = NLS-Keap1-(GS)6-TCF4 peptide
PAAKRVKLDGSGSGSQPDPRPSGAGACCRFLPLQSQCPEGAGDAVMYASTECKAEVTPSQHGNRTFSYTLEDHTKQAFGIMNELRLSQQLCDVTLQVKYQDAPAAQFMAHKVVLASSSPVFKAMFTNGLREQGMEVVSIEGIHPKVMERLIEFAYTASISMGEKCVLHVMNGAVMYQIDSVVRACSDFLVQQLDPSNAIGIANFAEQIGCVELHQRAREYIYMHFGEVAKQEEFFNLSHCQLVTLISRDDLNVRCESEVFHACINWVKYDCEQRRFYVQALLRAVRCHSLTPNFLQMQLQKCEILQSDSRCKDYLVKIFEELTLHKPTQVMPCRAPGSGSGSGSGSGSDDLGANDELISFKDEGEQEEKSSENSSAERDLADVKSSLVNESET

SEQ ID NO: 774 - protein, 393 aa, synthetic construct
  source 1..393: note = HA-NLS-Keap1-(GS)1-TCF4 peptide
MYPYDVPDYAPAAKRVKLDGSGSGSQPDPRPSGAGACCRFLPLQSQCPEGAGDAVMYASTECKAEVTPSQHGNRTFSYTLEDHTKQAFGIMNELRLSQQLCDVTLQVKYQDAPAAQFMAHKVVLASSSPVFKAMFTNGLREQGMEVVSIEGIHPKVMERLIEFAYTASISMGEKCVLHVMNGAVMYQIDSVVRACSDFLVQQLDPSNAIGIANFAEQIGCVELHQRAREYIYMHFGEVAKQEEFFNLSHCQLVTLISRDDLNVRCESEVFHACINWVKYDCEQRRFYVQALLRAVRCHSLTPNFLQMQLQKCEILQSDSRCKDYLVKIFEELTLHKPTQVMPCRAPGSDDLGANDELISFKDEGEQEEKSSENSSAERDLADVKSSLVNESET

SEQ ID NO: 775 - protein, 395 aa, synthetic construct
  source 1..395: note = HA-NLS-Keap1-(GS)2-TCF4 peptide
MYPYDVPDYAPAAKRVKLDGSGSGSQPDPRPSGAGACCRFLPLQSQCPEGAGDAVMYASTECKAEVTPSQHGNRTFSYTLEDHTKQAFGIMNELRLSQQLCDVTLQVKYQDAPAAQFMAHKVVLASSSPVFKAMFTNGLREQGMEVVSIEGIHPKVMERLIEFAYTASISMGEKCVLHVMNGAVMYQIDSVVRACSDFLVQQLDPSNAIGIANFAEQIGCVELHQRAREYIYMHFGEVAKQEEFFNLSHCQLVTLISRDDLNVRCESEVFHACINWVKYDCEQRRFYVQALLRAVRCHSLTPNFLQMQLQKCEILQSDSRCKDYLVKIFEELTLHKPTQVMPCRAPGSGSDDLGANDELISFKDEGEQEEKSSENSSAERDLADVKSSLVNESET

SEQ ID NO: 776 - protein, 397 aa, synthetic construct
  source 1..397: note = HA-NLS-Keap1-(GS)3-TCF4 peptide
MYPYDVPDYAPAAKRVKLDGSGSGSQPDPRPSGAGACCRFLPLQSQCPEGAGDAVMYASTECKAEVTPSQHGNRTFSYTLEDHTKQAFGIMNELRLSQQLCDVTLQVKYQDAPAAQFMAHKVVLASSSPVFKAMFTNGLREQGMEVVSIEGIHPKVMERLIEFAYTASISMGEKCVLHVMNGAVMYQIDSVVRACSDFLVQQLDPSNAIGIANFAEQIGCVELHQRAREYIYMHFGEVAKQEEFFNLSHCQLVTLISRDDLNVRCESEVFHACINWVKYDCEQRRFYVQALLRAVRCHSLTPNFLQMQLQKCEILQSDSRCKDYLVKIFEELTLHKPTQVMPCRAPGSGSGSDDLGANDELISFKDEGEQEEKSSENSSAERDLADVKSSLVNESET

SEQ ID NO: 777 - protein, 399 aa, synthetic construct
  source 1..399: note = HA-NLS-Keap1-(GS)4-TCF4 peptide
MYPYDVPDYAPAAKRVKLDGSGSGSQPDPRPSGAGACCRFLPLQSQCPEGAGDAVMYASTECKAEVTPSQHGNRTFSYTLEDHTKQAFGIMNELRLSQQLCDVTLQVKYQDAPAAQFMAHKVVLASSSPVFKAMFTNGLREQGMEVVSIEGIHPKVMERLIEFAYTASISMGEKCVLHVMNGAVMYQIDSVVRACSDFLVQQLDPSNAIGIANFAEQIGCVELHQRAREYIYMHFGEVAKQEEFFNLSHCQLVTLISRDDLNVRCESEVFHACINWVKYDCEQRRFYVQALLRAVRCHSLTPNFLQMQLQKCEILQSDSRCKDYLVKIFEELTLHKPTQVMPCRAPGSGSGSGSDDLGANDELISFKDEGEQEEKSSENSSAERDLADVKSSLVNESET

SEQ ID NO: 778 - protein, 401 aa, synthetic construct
  source 1..401: note = HA-NLS-Keap1-(GS)5-TCF4 peptide
MYPYDVPDYAPAAKRVKLDGSGSGSQPDPRPSGAGACCRFLPLQSQCPEGAGDAVMYASTECKAEVTPSQHGNRTFSYTLEDHTKQAFGIMNELRLSQQLCDVTLQVKYQDAPAAQFMAHKVVLASSSPVFKAMFTNGLREQGMEVVSIEGIHPKVMERLIEFAYTASISMGEKCVLHVMNGAVMYQIDSVVRACSDFLVQQLDPSNAIGIANFAEQIGCVELHQRAREYIYMHFGEVAKQEEFFNLSHCQLVTLISRDDLNVRCESEVFHACINWVKYDCEQRRFYVQALLRAVRCHSLTPNFLQMQLQKCEILQSDSRCKDYLVKIFEELTLHKPTQVMPCRAPGSGSGSGSGSDDLGANDELISFKDEGEQEEKSSENSSAERDLADVKSSLVNESET

SEQ ID NO: 779 - protein, 403 aa, synthetic construct
  source 1..403: note = HA-NLS-Keap1-(GS)6-TCF4 peptide
MYPYDVPDYAPAAKRVKLDGSGSGSQPDPRPSGAGACCRFLPLQSQCPEGAGDAVMYASTECKAEVTPSQHGNRTFSYTLEDHTKQAFGIMNELRLSQQLCDVTLQVKYQDAPAAQFMAHKVVLASSSPVFKAMFTNGLREQGMEVVSIEGIHPKVMERLIEFAYTASISMGEKCVLHVMNGAVMYQIDSVVRACSDFLVQQLDPSNAIGIANFAEQIGCVELHQRAREYIYMHFGEVAKQEEFFNLSHCQLVTLISRDDLNVRCESEVFHACINWVKYDCEQRRFYVQALLRAVRCHSLTPNFLQMQLQKCEILQSDSRCKDYLVKIFEELTLHKPTQVMPCRAPGSGSGSGSGSGSDDLGANDELISFKDEGEQEEKSSENSSAERDLADVKSSLVNESET

SEQ ID NO: 780 - protein, 189 aa, synthetic construct
  source 1..189: note = NLS-RNF125-(GS)1-TCF4 peptide
PAAKRVKLDGSGSGSGSVLSTDSGKSAPASATARALERRRDPELPVTSFDCAVCLEVLHQPVRTRCGHVFCRSCIATSLKNNKWTCPYCRAYLPSEGVPATDVAKRMKSEYKNCAECDTLVCLSEMRAHIRTCQKYIDKYGPGSDDLGANDELISFKDEGEQEEKSSENSSAERDLADVKSSLVNESET

SEQ ID NO: 781 - protein, 191 aa, synthetic construct
  source 1..191: note = NLS-RNF125-(GS)2-TCF4 peptide
PAAKRVKLDGSGSGSGSVLSTDSGKSAPASATARALERRRDPELPVTSFDCAVCLEVLHQPVRTRCGHVFCRSCIATSLKNNKWTCPYCRAYLPSEGVPATDVAKRMKSEYKNCAECDTLVCLSEMRAHIRTCQKYIDKYGPGSGSDDLGANDELISFKDEGEQEEKSSENSSAERDLADVKSSLVNESET

SEQ ID NO: 782 - protein, 193 aa, synthetic construct
  source 1..193: note = NLS-RNF125-(GS)3-TCF4 peptide
PAAKRVKLDGSGSGSGSVLSTDSGKSAPASATARALERRRDPELPVTSFDCAVCLEVLHQPVRTRCGHVFCRSCIATSLKNNKWTCPYCRAYLPSEGVPATDVAKRMKSEYKNCAECDTLVCLSEMRAHIRTCQKYIDKYGPGSGSGSDDLGANDELISFKDEGEQEEKSSENSSAERDLADVKSSLVNESET

SEQ ID NO: 783 - protein, 195 aa, synthetic construct
  source 1..195: note = NLS-RNF125-(GS)4-TCF4 peptide
PAAKRVKLDGSGSGSGSVLSTDSGKSAPASATARALERRRDPELPVTSFDCAVCLEVLHQPVRTRCGHVFCRSCIATSLKNNKWTCPYCRAYLPSEGVPATDVAKRMKSEYKNCAECDTLVCLSEMRAHIRTCQKYIDKYGPGSGSGSGSDDLGANDELISFKDEGEQEEKSSENSSAERDLADVKSSLVNESET

SEQ ID NO: 784 - protein, 197 aa, synthetic construct
  source 1..197: note = NLS-RNF125-(GS)5-TCF4 peptide
PAAKRVKLDGSGSGSGSVLSTDSGKSAPASATARALERRRDPELPVTSFDCAVCLEVLHQPVRTRCGHVFCRSCIATSLKNNKWTCPYCRAYLPSEGVPATDVAKRMKSEYKNCAECDTLVCLSEMRAHIRTCQKYIDKYGPGSGSGSGSGSDDLGANDELISFKDEGEQEEKSSENSSAERDLADVKSSLVNESET

SEQ ID NO: 785 - protein, 199 aa, synthetic construct
  source 1..199: note = NLS-RNF125-(GS)6-TCF4 peptide
PAAKRVKLDGSGSGSGSVLSTDSGKSAPASATARALERRRDPELPVTSFDCAVCLEVLHQPVRTRCGHVFCRSCIATSLKNNKWTCPYCRAYLPSEGVPATDVAKRMKSEYKNCAECDTLVCLSEMRAHIRTCQKYIDKYGPGSGSGSGSGSGSDDLGANDELISFKDEGEQEEKSSENSSAERDLADVKSSLVNESET

SEQ ID NO: 786 - protein, 199 aa, synthetic construct
  source 1..199: note = HA-NLS-RNF125-(GS)1-TCF4 peptide
MYPYDVPDYAPAAKRVKLDGSGSGSGSVLSTDSGKSAPASATARALERRRDPELPVTSFDCAVCLEVLHQPVRTRCGHVFCRSCIATSLKNNKWTCPYCRAYLPSEGVPATDVAKRMKSEYKNCAECDTLVCLSEMRAHIRTCQKYIDKYGPGSDDLGANDELISFKDEGEQEEKSSENSSAERDLADVKSSLVNESET

SEQ ID NO: 787 - protein, 201 aa, synthetic construct
  source 1..201: note = HA-NLS-RNF125-(GS)2-TCF4 peptide
MYPYDVPDYAPAAKRVKLDGSGSGSGSVLSTDSGKSAPASATARALERRRDPELPVTSFDCAVCLEVLHQPVRTRCGHVFCRSCIATSLKNNKWTCPYCRAYLPSEGVPATDVAKRMKSEYKNCAECDTLVCLSEMRAHIRTCQKYIDKYGPGSGSDDLGANDELISFKDEGEQEEKSSENSSAERDLADVKSSLVNESET

SEQ ID NO: 788 - protein, 203 aa, synthetic construct
  source 1..203: note = HA-NLS-RNF125-(GS)3-TCF4 peptide
MYPYDVPDYAPAAKRVKLDGSGSGSGSVLSTDSGKSAPASATARALERRRDPELPVTSFDCAVCLEVLHQPVRTRCGHVFCRSCIATSLKNNKWTCPYCRAYLPSEGVPATDVAKRMKSEYKNCAECDTLVCLSEMRAHIRTCQKYIDKYGPGSGSGSDDLGANDELISFKDEGEQEEKSSENSSAERDLADVKSSLVNESET

SEQ ID NO: 789 - protein, 205 aa, synthetic construct
  source 1..205: note = HA-NLS-RNF125-(GS)4-TCF4 peptide
MYPYDVPDYAPAAKRVKLDGSGSGSGSVLSTDSGKSAPASATARALERRRDPELPVTSFDCAVCLEVLHQPVRTRCGHVFCRSCIATSLKNNKWTCPYCRAYLPSEGVPATDVAKRMKSEYKNCAECDTLVCLSEMRAHIRTCQKYIDKYGPGSGSGSGSDDLGANDELISFKDEGEQEEKSSENSSAERDLADVKSSLVNESET

SEQ ID NO: 790 - protein, 207 aa, synthetic construct
  source 1..207: note = HA-NLS-RNF125-(GS)5-TCF4 peptide
MYPYDVPDYAPAAKRVKLDGSGSGSGSVLSTDSGKSAPASATARALERRRDPELPVTSFDCAVCLEVLHQPVRTRCGHVFCRSCIATSLKNNKWTCPYCRAYLPSEGVPATDVAKRMKSEYKNCAECDTLVCLSEMRAHIRTCQKYIDKYGPGSGSGSGSGSDDLGANDELISFKDEGEQEEKSSENSSAERDLADVKSSLVNESET

SEQ ID NO: 791 - protein, 209 aa, synthetic construct
  source 1..209: note = HA-NLS-RNF125-(GS)6-TCF4 peptide
MYPYDVPDYAPAAKRVKLDGSGSGSGSVLSTDSGKSAPASATARALERRRDPELPVTSFDCAVCLEVLHQPVRTRCGHVFCRSCIATSLKNNKWTCPYCRAYLPSEGVPATDVAKRMKSEYKNCAECDTLVCLSEMRAHIRTCQKYIDKYGPGSGSGSGSGSGSDDLGANDELISFKDEGEQEEKSSENSSAERDLADVKSSLVNESET

SEQ ID NO: 792 - protein, 289 aa, synthetic construct
  source 1..289: note = TCF4-(GS)1-SPOP-NLS peptide
MDDLGANDELISFKDEGEQEEKSSENSSAERDLADVKSSLVNESETGSNGLLPDDKLTLFCEVSVVQDSVNISGQNTMNMVKVPECRLADELGGLWENSRFTDCCLCVAGQEFQAHKAILAARSPVFSAMFEHEMEESKKNRVEINDVEPEVFKEMMCFIYTGKAPNLDKMADDLLAAADKYALERLKVMCEDALCSNLSVENAAEILILADLHSADQLKTQAVDFINYHASDVLETSGWKSMVVSHPHLVAEAYRSLASAQCPFLGPPRKRLKQSGSGSPAAKRVKLD

SEQ ID NO: 793 - protein, 291 aa, synthetic construct
  source 1..291: note = TCF4-(GS)2-SPOP-NLS peptide
MDDLGANDELISFKDEGEQEEKSSENSSAERDLADVKSSLVNESETGSGSNGLLPDDKLTLFCEVSVVQDSVNISGQNTMNMVKVPECRLADELGGLWENSRFTDCCLCVAGQEFQAHKAILAARSPVFSAMFEHEMEESKKNRVEINDVEPEVFKEMMCFIYTGKAPNLDKMADDLLAAADKYALERLKVMCEDALCSNLSVENAAEILILADLHSADQLKTQAVDFINYHASDVLETSGWKSMVVSHPHLVAEAYRSLASAQCPFLGPPRKRLKQSGSGSPAAKRVKLD

SEQ ID NO: 794 - protein, 293 aa, synthetic construct
  source 1..293: note = TCF4-(GS)3-SPOP-NLS peptide
MDDLGANDELISFKDEGEQEEKSSENSSAERDLADVKSSLVNESETGSGSGSNGLLPDDKLTLFCEVSVVQDSVNISGQNTMNMVKVPECRLADELGGLWENSRFTDCCLCVAGQEFQAHKAILAARSPVFSAMFEHEMEESKKNRVEINDVEPEVFKEMMCFIYTGKAPNLDKMADDLLAAADKYALERLKVMCEDALCSNLSVENAAEILILADLHSADQLKTQAVDFINYHASDVLETSGWKSMVVSHPHLVAEAYRSLASAQCPFLGPPRKRLKQSGSGSPAAKRVKLD

SEQ ID NO: 795 - protein, 295 aa, synthetic construct
  source 1..295: note = TCF4-(GS)4-SPOP-NLS peptide
MDDLGANDELISFKDEGEQEEKSSENSSAERDLADVKSSLVNESETGSGSGSGSNGLLPDDKLTLFCEVSVVQDSVNISGQNTMNMVKVPECRLADELGGLWENSRFTDCCLCVAGQEFQAHKAILAARSPVFSAMFEHEMEESKKNRVEINDVEPEVFKEMMCFIYTGKAPNLDKMADDLLAAADKYALERLKVMCEDALCSNLSVENAAEILILADLHSADQLKTQAVDFINYHASDVLETSGWKSMVVSHPHLVAEAYRSLASAQCPFLGPPRKRLKQSGSGSPAAKRVKLD

SEQ ID NO: 796 - protein, 298 aa, synthetic construct
  source 1..298: note = TCF4-(GS)5-SPOP-NLS peptide
MDDLGANDELISFKDEGEQEEKSSENSSAERDLADVKSSLVNESETGSGSGSGSGSNGLLPDDKLTLFCEVSVVQDSVNISGQNTMNMVKVPECRLADELGGLWENSRFTDCCLCVAGQEFQAHKAILAARSPVFSAMFEHEMEESKKNRVEINDVEPEVFKEMMCFIYTGKAPNLDKMADDLLAAADKYALERLKVMCEDALCSNLSVENAAEILILADLHSADQLKTQAVDFINYHASDVLETSGWKSMVVSHPHLVAEAYRSLASAQCPFLGPPRKRLKQSGSGSPAAKRVKLDA

SEQ ID NO: 797 - protein, 299 aa, synthetic construct
  source 1..299: note = TCF4-(GS)6-SPOP-NLS peptide
MDDLGANDELISFKDEGEQEEKSSENSSAERDLADVKSSLVNESETGSGSGSGSGSGSNGLLPDDKLTLFCEVSVVQDSVNISGQNTMNMVKVPECRLADELGGLWENSRFTDCCLCVAGQEFQAHKAILAARSPVFSAMFEHEMEESKKNRVEINDVEPEVFKEMMCFIYTGKAPNLDKMADDLLAAADKYALERLKVMCEDALCSNLSVENAAEILILADLHSADQLKTQAVDFINYHASDVLETSGWKSMVVSHPHLVAEAYRSLASAQCPFLGPPRKRLKQSGSGSPAAKRVKLD

SEQ ID NO: 798 - protein, 298 aa, synthetic construct
  source 1..298: note = TCF4-(GS)1-SPOP-NLS-HA peptide
MDDLGANDELISFKDEGEQEEKSSENSSAERDLADVKSSLVNESETGSNGLLPDDKLTLFCEVSVVQDSVNISGQNTMNMVKVPECRLADELGGLWENSRFTDCCLCVAGQEFQAHKAILAARSPVFSAMFEHEMEESKKNRVEINDVEPEVFKEMMCFIYTGKAPNLDKMADDLLAAADKYALERLKVMCEDALCSNLSVENAAEILILADLHSADQLKTQAVDFINYHASDVLETSGWKSMVVSHPHLVAEAYRSLASAQCPFLGPPRKRLKQSGSGSPAAKRVKLDYPYDVPDYA

SEQ ID NO: 799 - protein, 300 aa, synthetic construct
  source 1..300: note = TCF4-(GS)2-SPOP-NLS-HA peptide
MDDLGANDELISFKDEGEQEEKSSENSSAERDLADVKSSLVNESETGSGSNGLLPDDKLTLFCEVSVVQDSVNISGQNTMNMVKVPECRLADELGGLWENSRFTDCCLCVAGQEFQAHKAILAARSPVFSAMFEHEMEESKKNRVEINDVEPEVFKEMMCFIYTGKAPNLDKMADDLLAAADKYALERLKVMCEDALCSNLSVENAAEILILADLHSADQLKTQAVDFINYHASDVLETSGWKSMVVSHPHLVAEAYRSLASAQCPFLGPPRKRLKQSGSGSPAAKRVKLDYPYDVPDYA

SEQ ID NO: 800 - protein, 302 aa, synthetic construct
  source 1..302: note = TCF4-(GS)3-SPOP-NLS-HA peptide
MDDLGANDELISFKDEGEQEEKSSENSSAERDLADVKSSLVNESETGSGSGSNGLLPDDKLTLFCEVSVVQDSVNISGQNTMNMVKVPECRLADELGGLWENSRFTDCCLCVAGQEFQAHKAILAARSPVFSAMFEHEMEESKKNRVEINDVEPEVFKEMMCFIYTGKAPNLDKMADDLLAAADKYALERLKVMCEDALCSNLSVENAAEILILADLHSADQLKTQAVDFINYHASDVLETSGWKSMVVSHPHLVAEAYRSLASAQCPFLGPPRKRLKQSGSGSPAAKRVKLDYPYDVPDYA

SEQ ID NO: 801 - protein, 304 aa, synthetic construct
  source 1..304: note = TCF4-(GS)4-SPOP-NLS-HA peptide
MDDLGANDELISFKDEGEQEEKSSENSSAERDLADVKSSLVNESETGSGSGSGSNGLLPDDKLTLFCEVSVVQDSVNISGQNTMNMVKVPECRLADELGGLWENSRFTDCCLCVAGQEFQAHKAILAARSPVFSAMFEHEMEESKKNRVEINDVEPEVFKEMMCFIYTGKAPNLDKMADDLLAAADKYALERLKVMCEDALCSNLSVENAAEILILADLHSADQLKTQAVDFINYHASDVLETSGWKSMVVSHPHLVAEAYRSLASAQCPFLGPPRKRLKQSGSGSPAAKRVKLDYPYDVPDYA

SEQ ID NO: 802 - protein, 307 aa, synthetic construct
  source 1..307: note = TCF4-(GS)5-SPOP-NLS-HA peptide
MDDLGANDELISFKDEGEQEEKSSENSSAERDLADVKSSLVNESETGSGSGSGSGSNGLLPDDKLTLFCEVSVVQDSVNISGQNTMNMVKVPECRLADELGGLWENSRFTDCCLCVAGQEFQAHKAILAARSPVFSAMFEHEMEESKKNRVEINDVEPEVFKEMMCFIYTGKAPNLDKMADDLLAAADKYALERLKVMCEDALCSNLSVENAAEILILADLHSADQLKTQAVDFINYHASDVLETSGWKSMVVSHPHLVAEAYRSLASAQCPFLGPPRKRLKQSGSGSPAAKRVKLDYPYDVPDYAA

SEQ ID NO: 803 - protein, 308 aa, synthetic construct
  source 1..308: note = TCF4-(GS)6-SPOP-NLS-HA peptide
MDDLGANDELISFKDEGEQEEKSSENSSAERDLADVKSSLVNESETGSGSGSGSGSGSNGLLPDDKLTLFCEVSVVQDSVNISGQNTMNMVKVPECRLADELGGLWENSRFTDCCLCVAGQEFQAHKAILAARSPVFSAMFEHEMEESKKNRVEINDVEPEVFKEMMCFIYTGKAPNLDKMADDLLAAADKYALERLKVMCEDALCSNLSVENAAEILILADLHSADQLKTQAVDFINYHASDVLETSGWKSMVVSHPHLVAEAYRSLASAQCPFLGPPRKRLKQSGSGSPAAKRVKLDYPYDVPDYA

SEQ ID NO: 804 - protein, 157 aa, synthetic construct
  source 1..157: note = NLS-TCF4-(GS)1-RNF114 peptide
PAAKRVKLDGSGSGSDDLGANDELISFKDEGEQEEKSSENSSAERDLADVKSSLVNESETGSGRFTCPVCLEVYEKPVQVPCGHVFCSACLQECLKPKKPVCGVCRSALAPGVRAVELERQIESTETSCHGCRKNFFLSKIRSHVATCSKYQNYIME

SEQ ID NO: 805 - protein, 159 aa, synthetic construct
  source 1..159: note = NLS-TCF4-(GS)2-RNF114 peptide
PAAKRVKLDGSGSGSDDLGANDELISFKDEGEQEEKSSENSSAERDLADVKSSLVNESETGSGSGRFTCPVCLEVYEKPVQVPCGHVFCSACLQECLKPKKPVCGVCRSALAPGVRAVELERQIESTETSCHGCRKNFFLSKIRSHVATCSKYQNYIME

SEQ ID NO: 806 - protein, 161 aa, synthetic construct
  source 1..161: note = NLS-TCF4-(GS)3-RNF114 peptide
PAAKRVKLDGSGSGSDDLGANDELISFKDEGEQEEKSSENSSAERDLADVKSSLVNESETGSGSGSGRFTCPVCLEVYEKPVQVPCGHVFCSACLQECLKPKKPVCGVCRSALAPGVRAVELERQIESTETSCHGCRKNFFLSKIRSHVATCSKYQNYIME

SEQ ID NO: 807 - protein, 163 aa, synthetic construct
  source 1..163: note = NLS-TCF4-(GS)4-RNF114 peptide
PAAKRVKLDGSGSGSDDLGANDELISFKDEGEQEEKSSENSSAERDLADVKSSLVNESETGSGSGSGSGRFTCPVCLEVYEKPVQVPCGHVFCSACLQECLKPKKPVCGVCRSALAPGVRAVELERQIESTETSCHGCRKNFFLSKIRSHVATCSKYQNYIME

SEQ ID NO: 808 - protein, 165 aa, synthetic construct
  source 1..165: note = NLS-TCF4-(GS)5-RNF114 peptide
PAAKRVKLDGSGSGSDDLGANDELISFKDEGEQEEKSSENSSAERDLADVKSSLVNESETGSGSGSGSGSGRFTCPVCLEVYEKPVQVPCGHVFCSACLQECLKPKKPVCGVCRSALAPGVRAVELERQIESTETSCHGCRKNFFLSKIRSHVATCSKYQNYIME

SEQ ID NO: 809 - protein, 167 aa, synthetic construct
  source 1..167: note = NLS-TCF4-(GS)6-RNF114 peptide
PAAKRVKLDGSGSGSDDLGANDELISFKDEGEQEEKSSENSSAERDLADVKSSLVNESETGSGSGSGSGSGSGRFTCPVCLEVYEKPVQVPCGHVFCSACLQECLKPKKPVCGVCRSALAPGVRAVELERQIESTETSCHGCRKNFFLSKIRSHVATCSKYQNYIME

SEQ ID NO: 810 - protein, 167 aa, synthetic construct
  source 1..167: note = HA-NLS-TCF4-(GS)1-RNF114 peptide
MYPYDVPDYAPAAKRVKLDGSGSGSDDLGANDELISFKDEGEQEEKSSENSSAERDLADVKSSLVNESETGSGRFTCPVCLEVYEKPVQVPCGHVFCSACLQECLKPKKPVCGVCRSALAPGVRAVELERQIESTETSCHGCRKNFFLSKIRSHVATCSKYQNYIME

SEQ ID NO: 811 - protein, 169 aa, synthetic construct
  source 1..169: note = HA-NLS-TCF4-(GS)2-RNF114 peptide
MYPYDVPDYAPAAKRVKLDGSGSGSDDLGANDELISFKDEGEQEEKSSENSSAERDLADVKSSLVNESETGSGSGRFTCPVCLEVYEKPVQVPCGHVFCSACLQECLKPKKPVCGVCRSALAPGVRAVELERQIESTETSCHGCRKNFFLSKIRSHVATCSKYQNYIME

SEQ ID NO: 812 - protein, 171 aa, synthetic construct
  source 1..171: note = HA-NLS-TCF4-(GS)3-RNF114 peptide
MYPYDVPDYAPAAKRVKLDGSGSGSDDLGANDELISFKDEGEQEEKSSENSSAERDLADVKSSLVNESETGSGSGSGRFTCPVCLEVYEKPVQVPCGHVFCSACLQECLKPKKPVCGVCRSALAPGVRAVELERQIESTETSCHGCRKNFFLSKIRSHVATCSKYQNYIME

SEQ ID NO: 813 - protein, 173 aa, synthetic construct
  source 1..173: note = HA-NLS-TCF4-(GS)4-RNF114 peptide
MYPYDVPDYAPAAKRVKLDGSGSGSDDLGANDELISFKDEGEQEEKSSENSSAERDLADVKSSLVNESETGSGSGSGSGRFTCPVCLEVYEKPVQVPCGHVFCSACLQECLKPKKPVCGVCRSALAPGVRAVELERQIESTETSCHGCRKNFFLSKIRSHVATCSKYQNYIME

SEQ ID NO: 814 - protein, 175 aa, synthetic construct
  source 1..175: note = HA-NLS-TCF4-(GS)5-RNF114 peptide
MYPYDVPDYAPAAKRVKLDGSGSGSDDLGANDELISFKDEGEQEEKSSENSSAERDLADVKSSLVNESETGSGSGSGSGSGRFTCPVCLEVYEKPVQVPCGHVFCSACLQECLKPKKPVCGVCRSALAPGVRAVELERQIESTETSCHGCRKNFFLSKIRSHVATCSKYQNYIME

SEQ ID NO: 815 - protein, 177 aa, synthetic construct
  source 1..177: note = HA-NLS-TCF4-(GS)6-RNF114 peptide
MYPYDVPDYAPAAKRVKLDGSGSGSDDLGANDELISFKDEGEQEEKSSENSSAERDLADVKSSLVNESETGSGSGSGSGSGSGRFTCPVCLEVYEKPVQVPCGHVFCSACLQECLKPKKPVCGVCRSALAPGVRAVELERQIESTETSCHGCRKNFFLSKIRSHVATCSKYQNYIME

SEQ ID NO: 816 - protein, 158 aa, synthetic construct
  source 1..158: note = RNF114-(GS)1-TCF4-NLS peptide
MGRFTCPVCLEVYEKPVQVPCGHVFCSACLQECLKPKKPVCGVCRSALAPGVRAVELERQIESTETSCHGCRKNFFLSKIRSHVATCSKYQNYIMEGSDDLGANDELISFKDEGEQEEKSSENSSAERDLADVKSSLVNESETGSGSGSPAAKRVKLD

SEQ ID NO: 817 - protein, 160 aa, synthetic construct
  source 1..160: note = RNF114-(GS)2-TCF4-NLS peptide
MGRFTCPVCLEVYEKPVQVPCGHVFCSACLQECLKPKKPVCGVCRSALAPGVRAVELERQIESTETSCHGCRKNFFLSKIRSHVATCSKYQNYIMEGSGSDDLGANDELISFKDEGEQEEKSSENSSAERDLADVKSSLVNESETGSGSGSPAAKRVKLD

SEQ ID NO: 818 - protein, 162 aa, synthetic construct
  source 1..162: note = RNF114-(GS)3-TCF4-NLS peptide
MGRFTCPVCLEVYEKPVQVPCGHVFCSACLQECLKPKKPVCGVCRSALAPGVRAVELERQIESTETSCHGCRKNFFLSKIRSHVATCSKYQNYIMEGSGSGSDDLGANDELISFKDEGEQEEKSSENSSAERDLADVKSSLVNESETGSGSGSPAAKRVKLD

SEQ ID NO: 819 - protein, 164 aa, synthetic construct
  source 1..164: note = RNF114-(GS)4-TCF4-NLS peptide
MGRFTCPVCLEVYEKPVQVPCGHVFCSACLQECLKPKKPVCGVCRSALAPGVRAVELERQIESTETSCHGCRKNFFLSKIRSHVATCSKYQNYIMEGSGSGSGSDDLGANDELISFKDEGEQEEKSSENSSAERDLADVKSSLVNESETGSGSGSPAAKRVKLD

SEQ ID NO: 820 - protein, 166 aa, synthetic construct
  source 1..166: note = RNF114-(GS)5-TCF4-NLS peptide
MGRFTCPVCLEVYEKPVQVPCGHVFCSACLQECLKPKKPVCGVCRSALAPGVRAVELERQIESTETSCHGCRKNFFLSKIRSHVATCSKYQNYIMEGSGSGSGSGSDDLGANDELISFKDEGEQEEKSSENSSAERDLADVKSSLVNESETGSGSGSPAAKRVKLD

SEQ ID NO: 821 - protein, 168 aa, synthetic construct
  source 1..168: note = RNF114-(GS)6-TCF4-NLS peptide
MGRFTCPVCLEVYEKPVQVPCGHVFCSACLQECLKPKKPVCGVCRSALAPGVRAVELERQIESTETSCHGCRKNFFLSKIRSHVATCSKYQNYIMEGSGSGSGSGSGSDDLGANDELISFKDEGEQEEKSSENSSAERDLADVKSSLVNESETGSGSGSPAAKRVKLD

SEQ ID NO: 822 - protein, 167 aa, synthetic construct
  source 1..167: note = RNF114-(GS)1-TCF4-NLS-HA peptide
MGRFTCPVCLEVYEKPVQVPCGHVFCSACLQECLKPKKPVCGVCRSALAPGVRAVELERQIESTETSCHGCRKNFFLSKIRSHVATCSKYQNYIMEGSDDLGANDELISFKDEGEQEEKSSENSSAERDLADVKSSLVNESETGSGSGSPAAKRVKLDYPYDVPDYA

SEQ ID NO: 823 - protein, 169 aa, synthetic construct
  source 1..169: note = RNF114-(GS)2-TCF4-NLS-HA peptide
MGRFTCPVCLEVYEKPVQVPCGHVFCSACLQECLKPKKPVCGVCRSALAPGVRAVELERQIESTETSCHGCRKNFFLSKIRSHVATCSKYQNYIMEGSGSDDLGANDELISFKDEGEQEEKSSENSSAERDLADVKSSLVNESETGSGSGSPAAKRVKLDYPYDVPDYA

SEQ ID NO: 824 - protein, 171 aa, synthetic construct
  source 1..171: note = RNF114-(GS)3-TCF4-NLS-HA peptide
MGRFTCPVCLEVYEKPVQVPCGHVFCSACLQECLKPKKPVCGVCRSALAPGVRAVELERQIESTETSCHGCRKNFFLSKIRSHVATCSKYQNYIMEGSGSGSDDLGANDELISFKDEGEQEEKSSENSSAERDLADVKSSLVNESETGSGSGSPAAKRVKLDYPYDVPDYA

SEQ ID NO: 825 - protein, 173 aa, synthetic construct
  source 1..173: note = RNF114-(GS)4-TCF4-NLS-HA peptide
MGRFTCPVCLEVYEKPVQVPCGHVFCSACLQECLKPKKPVCGVCRSALAPGVRAVELERQIESTETSCHGCRKNFFLSKIRSHVATCSKYQNYIMEGSGSGSGSDDLGANDELISFKDEGEQEEKSSENSSAERDLADVKSSLVNESETGSGSGSPAAKRVKLDYPYDVPDYA

SEQ ID NO: 826 - protein, 175 aa, synthetic construct
  source 1..175: note = RNF114-(GS)5-TCF4-NLS-HA peptide
MGRFTCPVCLEVYEKPVQVPCGHVFCSACLQECLKPKKPVCGVCRSALAPGVRAVELERQIESTETSCHGCRKNFFLSKIRSHVATCSKYQNYIMEGSGSGSGSGSDDLGANDELISFKDEGEQEEKSSENSSAERDLADVKSSLVNESETGSGSGSPAAKRVKLDYPYDVPDYA

SEQ ID NO: 827 - protein, 177 aa, synthetic construct
  source 1..177: note = RNF114-(GS)6-TCF4-NLS-HA peptide
MGRFTCPVCLEVYEKPVQVPCGHVFCSACLQECLKPKKPVCGVCRSALAPGVRAVELERQIESTETSCHGCRKNFFLSKIRSHVATCSKYQNYIMEGSGSGSGSGSGSDDLGANDELISFKDEGEQEEKSSENSSAERDLADVKSSLVNESETGSGSGSPAAKRVKLDYPYDVPDYA

SEQ ID NO: 828 - protein, 162 aa, synthetic construct
  source 1..162: note = NLS-TCF4-(GS)1-RNF138 peptide
PAAKRVKLDGSGSGSDDLGANDELISFKDEGEQEEKSSENSSAERDLADVKSSLVNESETGSDDFYCPVCQEVLKTPVRTTACQHVFCRKCFLTAMRESGAHCPLCRGNVTRRERACPERALDLENIMRKFSGSCRCCAKQIKFYRMRHHYKSCKKYQDEYG

SEQ ID NO: 829 - protein, 164 aa, synthetic construct
  source 1..164: note = NLS-TCF4-(GS)2-RNF138 peptide
PAAKRVKLDGSGSGSDDLGANDELISFKDEGEQEEKSSENSSAERDLADVKSSLVNESETGSGSDDFYCPVCQEVLKTPVRTTACQHVFCRKCFLTAMRESGAHCPLCRGNVTRRERACPERALDLENIMRKFSGSCRCCAKQIKFYRMRHHYKSCKKYQDEYG

SEQ ID NO: 830 - protein, 166 aa, synthetic construct
  source 1..166: note = NLS-TCF4-(GS)3-RNF138 peptide
PAAKRVKLDGSGSGSDDLGANDELISFKDEGEQEEKSSENSSAERDLADVKSSLVNESETGSGSGSDDFYCPVCQEVLKTPVRTTACQHVFCRKCFLTAMRESGAHCPLCRGNVTRRERACPERALDLENIMRKFSGSCRCCAKQIKFYRMRHHYKSCKKYQDEYG

SEQ ID NO: 831 - protein, 168 aa, synthetic construct
  source 1..168: note = NLS-TCF4-(GS)4-RNF138 peptide
PAAKRVKLDGSGSGSDDLGANDELISFKDEGEQEEKSSENSSAERDLADVKSSLVNESETGSGSGSGSDDFYCPVCQEVLKTPVRTTACQHVFCRKCFLTAMRESGAHCPLCRGNVTRRERACPERALDLENIMRKFSGSCRCCAKQIKFYRMRHHYKSCKKYQDEYG

SEQ ID NO: 832 - protein, 170 aa, synthetic construct
  source 1..170: note = NLS-TCF4-(GS)5-RNF138 peptide
PAAKRVKLDGSGSGSDDLGANDELISFKDEGEQEEKSSENSSAERDLADVKSSLVNESETGSGSGSGSGSDDFYCPVCQEVLKTPVRTTACQHVFCRKCFLTAMRESGAHCPLCRGNVTRRERACPERALDLENIMRKFSGSCRCCAKQIKFYRMRHHYKSCKKYQDEYG

SEQ ID NO: 833 - protein, 172 aa, synthetic construct
  source 1..172: note = NLS-TCF4-(GS)6-RNF138 peptide
PAAKRVKLDGSGSGSDDLGANDELISFKDEGEQEEKSSENSSAERDLADVKSSLVNESETGSGSGSGSGSGSDDFYCPVCQEVLKTPVRTTACQHVFCRKCFLTAMRESGAHCPLCRGNVTRRERACPERALDLENIMRKFSGSCRCCAKQIKFYRMRHHYKSCKKYQDEYG

SEQ ID NO: 834 - protein, 172 aa, synthetic construct
  source 1..172: note = HA-NLS-TCF4-(GS)1-RNF138 peptide
MYPYDVPDYAPAAKRVKLDGSGSGSDDLGANDELISFKDEGEQEEKSSENSSAERDLADVKSSLVNESETGSDDFYCPVCQEVLKTPVRTTACQHVFCRKCFLTAMRESGAHCPLCRGNVTRRERACPERALDLENIMRKFSGSCRCCAKQIKFYRMRHHYKSCKKYQDEYG

SEQ ID NO: 835 - protein, 174 aa, synthetic construct
  source 1..174: note = HA-NLS-TCF4-(GS)2-RNF138 peptide
MYPYDVPDYAPAAKRVKLDGSGSGSDDLGANDELISFKDEGEQEEKSSENSSAERDLADVKSSLVNESETGSGSDDFYCPVCQEVLKTPVRTTACQHVFCRKCFLTAMRESGAHCPLCRGNVTRRERACPERALDLENIMRKFSGSCRCCAKQIKFYRMRHHYKSCKKYQDEYG

SEQ ID NO: 836 - protein, 176 aa, synthetic construct
  source 1..176: note = HA-NLS-TCF4-(GS)3-RNF138 peptide
MYPYDVPDYAPAAKRVKLDGSGSGSDDLGANDELISFKDEGEQEEKSSENSSAERDLADVKSSLVNESETGSGSGSDDFYCPVCQEVLKTPVRTTACQHVFCRKCFLTAMRESGAHCPLCRGNVTRRERACPERALDLENIMRKFSGSCRCCAKQIKFYRMRHHYKSCKKYQDEYG

SEQ ID NO: 837 - protein, 178 aa, synthetic construct
  source 1..178: note = HA-NLS-TCF4-(GS)4-RNF138 peptide
MYPYDVPDYAPAAKRVKLDGSGSGSDDLGANDELISFKDEGEQEEKSSENSSAERDLADVKSSLVNESETGSGSGSGSDDFYCPVCQEVLKTPVRTTACQHVFCRKCFLTAMRESGAHCPLCRGNVTRRERACPERALDLENIMRKFSGSCRCCAKQIKFYRMRHHYKSCKKYQDEYG

SEQ ID NO: 838 - protein, 180 aa, synthetic construct
  source 1..180: note = HA-NLS-TCF4-(GS)5-RNF138 peptide
MYPYDVPDYAPAAKRVKLDGSGSGSDDLGANDELISFKDEGEQEEKSSENSSAERDLADVKSSLVNESETGSGSGSGSGSDDFYCPVCQEVLKTPVRTTACQHVFCRKCFLTAMRESGAHCPLCRGNVTRRERACPERALDLENIMRKFSGSCRCCAKQIKFYRMRHHYKSCKKYQDEYG

SEQ ID NO: 839 - protein, 182 aa, synthetic construct
  source 1..182: note = HA-NLS-TCF4-(GS)6-RNF138 peptide
MYPYDVPDYAPAAKRVKLDGSGSGSDDLGANDELISFKDEGEQEEKSSENSSAERDLADVKSSLVNESETGSGSGSGSGSGSDDFYCPVCQEVLKTPVRTTACQHVFCRKCFLTAMRESGAHCPLCRGNVTRRERACPERALDLENIMRKFSGSCRCCAKQIKFYRMRHHYKSCKKYQDEYG

SEQ ID NO: 840 - protein, 163 aa, synthetic construct
  source 1..163: note = RNF138-(GS)1-TCF4-NLS peptide
MDDFYCPVCQEVLKTPVRTTACQHVFCRKCFLTAMRESGAHCPLCRGNVTRRERACPERALDLENIMRKFSGSCRCCAKQIKFYRMRHHYKSCKKYQDEYGGSDDLGANDELISFKDEGEQEEKSSENSSAERDLADVKSSLVNESETGSGSGSPAAKRVKLD

SEQ ID NO: 841 - protein, 165 aa, synthetic construct
  source 1..165: note = RNF138-(GS)2-TCF4-NLS peptide
MDDFYCPVCQEVLKTPVRTTACQHVFCRKCFLTAMRESGAHCPLCRGNVTRRERACPERALDLENIMRKFSGSCRCCAKQIKFYRMRHHYKSCKKYQDEYGGSGSDDLGANDELISFKDEGEQEEKSSENSSAERDLADVKSSLVNESETGSGSGSPAAKRVKLD

SEQ ID NO: 842 - protein, 167 aa, synthetic construct
  source 1..167: note = RNF138-(GS)3-TCF4-NLS peptide
MDDFYCPVCQEVLKTPVRTTACQHVFCRKCFLTAMRESGAHCPLCRGNVTRRERACPERALDLENIMRKFSGSCRCCAKQIKFYRMRHHYKSCKKYQDEYGGSGSGSDDLGANDELISFKDEGEQEEKSSENSSAERDLADVKSSLVNESETGSGSGSPAAKRVKLD

SEQ ID NO: 843 - protein, 169 aa, synthetic construct
  source 1..169: note = RNF138-(GS)4-TCF4-NLS peptide
MDDFYCPVCQEVLKTPVRTTACQHVFCRKCFLTAMRESGAHCPLCRGNVTRRERACPERALDLENIMRKFSGSCRCCAKQIKFYRMRHHYKSCKKYQDEYGGSGSGSGSDDLGANDELISFKDEGEQEEKSSENSSAERDLADVKSSLVNESETGSGSGSPAAKRVKLD

SEQ ID NO: 844 - protein, 171 aa, synthetic construct
  source 1..171: note = RNF138-(GS)5-TCF4-NLS peptide
MDDFYCPVCQEVLKTPVRTTACQHVFCRKCFLTAMRESGAHCPLCRGNVTRRERACPERALDLENIMRKFSGSCRCCAKQIKFYRMRHHYKSCKKYQDEYGGSGSGSGSGSDDLGANDELISFKDEGEQEEKSSENSSAERDLADVKSSLVNESETGSGSGSPAAKRVKLD

SEQ ID NO: 845 - protein, 173 aa, synthetic construct
  source 1..173: note = RNF138-(GS)6-TCF4-NLS peptide
MDDFYCPVCQEVLKTPVRTTACQHVFCRKCFLTAMRESGAHCPLCRGNVTRRERACPERALDLENIMRKFSGSCRCCAKQIKFYRMRHHYKSCKKYQDEYGGSGSGSGSGSGSDDLGANDELISFKDEGEQEEKSSENSSAERDLADVKSSLVNESETGSGSGSPAAKRVKLD

SEQ ID NO: 846 - protein, 172 aa, synthetic construct
  source 1..172: note = RNF138-(GS)1-TCF4-NLS-HA peptide
MDDFYCPVCQEVLKTPVRTTACQHVFCRKCFLTAMRESGAHCPLCRGNVTRRERACPERALDLENIMRKFSGSCRCCAKQIKFYRMRHHYKSCKKYQDEYGGSDDLGANDELISFKDEGEQEEKSSENSSAERDLADVKSSLVNESETGSGSGSPAAKRVKLDYPYDVPDYA

SEQ ID NO: 847 - protein, 174 aa, synthetic construct
  source 1..174: note = RNF138-(GS)2-TCF4-NLS-HA peptide
MDDFYCPVCQEVLKTPVRTTACQHVFCRKCFLTAMRESGAHCPLCRGNVTRRERACPERALDLENIMRKFSGSCRCCAKQIKFYRMRHHYKSCKKYQDEYGGSGSDDLGANDELISFKDEGEQEEKSSENSSAERDLADVKSSLVNESETGSGSGSPAAKRVKLDYPYDVPDYA

SEQ ID NO: 848 - protein, 176 aa, synthetic construct
  source 1..176: note = RNF138-(GS)3-TCF4-NLS-HA peptide
MDDFYCPVCQEVLKTPVRTTACQHVFCRKCFLTAMRESGAHCPLCRGNVTRRERACPERALDLENIMRKFSGSCRCCAKQIKFYRMRHHYKSCKKYQDEYGGSGSGSDDLGANDELISFKDEGEQEEKSSENSSAERDLADVKSSLVNESETGSGSGSPAAKRVKLDYPYDVPDYA

SEQ ID NO: 849 - protein, 178 aa, synthetic construct
  source 1..178: note = RNF138-(GS)4-TCF4-NLS-HA peptide
MDDFYCPVCQEVLKTPVRTTACQHVFCRKCFLTAMRESGAHCPLCRGNVTRRERACPERALDLENIMRKFSGSCRCCAKQIKFYRMRHHYKSCKKYQDEYGGSGSGSGSDDLGANDELISFKDEGEQEEKSSENSSAERDLADVKSSLVNESETGSGSGSPAAKRVKLDYPYDVPDYA

SEQ ID NO: 850 - protein, 180 aa, synthetic construct
  source 1..180: note = RNF138-(GS)5-TCF4-NLS-HA peptide
MDDFYCPVCQEVLKTPVRTTACQHVFCRKCFLTAMRESGAHCPLCRGNVTRRERACPERALDLENIMRKFSGSCRCCAKQIKFYRMRHHYKSCKKYQDEYGGSGSGSGSGSDDLGANDELISFKDEGEQEEKSSENSSAERDLADVKSSLVNESETGSGSGSPAAKRVKLDYPYDVPDYA

SEQ ID NO: 851 - protein, 182 aa, synthetic construct
  source 1..182: note = RNF138-(GS)6-TCF4-NLS-HA peptide
MDDFYCPVCQEVLKTPVRTTACQHVFCRKCFLTAMRESGAHCPLCRGNVTRRERACPERALDLENIMRKFSGSCRCCAKQIKFYRMRHHYKSCKKYQDEYGGSGSGSGSGSGSDDLGANDELISFKDEGEQEEKSSENSSAERDLADVKSSLVNESETGSGSGSPAAKRVKLDYPYDVPDYA

SEQ ID NO: 852 - protein, 163 aa, synthetic construct
  source 1..163: note = NLS-TCF4-(GS)1-RNF166 peptide
PAAKRVKLDGSGSGSDDLGANDELISFKDEGEQEEKSSENSSAERDLADVKSSLVNESETGSGLEAQYTCPICLEVYHRPVAIGSCGHTFCGECLQPCLQVPSPLCPLCRLPFDPKKVDKATHVEKQLSSYKAPCRGCNKKVTLAKMRVHISSCLKVQEQMAN

SEQ ID NO: 853 - protein, 165 aa, synthetic construct
  source 1..165: note = NLS-TCF4-(GS)2-RNF166 peptide
PAAKRVKLDGSGSGSDDLGANDELISFKDEGEQEEKSSENSSAERDLADVKSSLVNESETGSGSGLEAQYTCPICLEVYHRPVAIGSCGHTFCGECLQPCLQVPSPLCPLCRLPFDPKKVDKATHVEKQLSSYKAPCRGCNKKVTLAKMRVHISSCLKVQEQMAN

SEQ ID NO: 854 - protein, 167 aa, synthetic construct
  source 1..167: note = NLS-TCF4-(GS)3-RNF166 peptide
PAAKRVKLDGSGSGSDDLGANDELISFKDEGEQEEKSSENSSAERDLADVKSSLVNESETGSGSGSGLEAQYTCPICLEVYHRPVAIGSCGHTFCGECLQPCLQVPSPLCPLCRLPFDPKKVDKATHVEKQLSSYKAPCRGCNKKVTLAKMRVHISSCLKVQEQMAN

SEQ ID NO: 855 - protein, 169 aa, synthetic construct
  source 1..169: note = NLS-TCF4-(GS)4-RNF166 peptide
PAAKRVKLDGSGSGSDDLGANDELISFKDEGEQEEKSSENSSAERDLADVKSSLVNESETGSGSGSGSGLEAQYTCPICLEVYHRPVAIGSCGHTFCGECLQPCLQVPSPLCPLCRLPFDPKKVDKATHVEKQLSSYKAPCRGCNKKVTLAKMRVHISSCLKVQEQMAN

SEQ ID NO: 856 - protein, 171 aa, synthetic construct
  source 1..171: note = NLS-TCF4-(GS)5-RNF166 peptide
PAAKRVKLDGSGSGSDDLGANDELISFKDEGEQEEKSSENSSAERDLADVKSSLVNESETGSGSGSGSGSGLEAQYTCPICLEVYHRPVAIGSCGHTFCGECLQPCLQVPSPLCPLCRLPFDPKKVDKATHVEKQLSSYKAPCRGCNKKVTLAKMRVHISSCLKVQEQMAN

SEQ ID NO: 857 - protein, 173 aa, synthetic construct
  source 1..173: note = NLS-TCF4-(GS)6-RNF166 peptide
PAAKRVKLDGSGSGSDDLGANDELISFKDEGEQEEKSSENSSAERDLADVKSSLVNESETGSGSGSGSGSGSGLEAQYTCPICLEVYHRPVAIGSCGHTFCGECLQPCLQVPSPLCPLCRLPFDPKKVDKATHVEKQLSSYKAPCRGCNKKVTLAKMRVHISSCLKVQEQMAN

SEQ ID NO: 858 - protein, 173 aa, synthetic construct
  source 1..173: note = HA-NLS-TCF4-(GS)1-RNF166 peptide
MYPYDVPDYAPAAKRVKLDGSGSGSDDLGANDELISFKDEGEQEEKSSENSSAERDLADVKSSLVNESETGSGLEAQYTCPICLEVYHRPVAIGSCGHTFCGECLQPCLQVPSPLCPLCRLPFDPKKVDKATHVEKQLSSYKAPCRGCNKKVTLAKMRVHISSCLKVQEQMAN

SEQ ID NO: 859 - protein, 175 aa, synthetic construct
  source 1..175: note = HA-NLS-TCF4-(GS)2-RNF166 peptide
MYPYDVPDYAPAAKRVKLDGSGSGSDDLGANDELISFKDEGEQEEKSSENSSAERDLADVKSSLVNESETGSGSGLEAQYTCPICLEVYHRPVAIGSCGHTFCGECLQPCLQVPSPLCPLCRLPFDPKKVDKATHVEKQLSSYKAPCRGCNKKVTLAKMRVHISSCLKVQEQMAN

SEQ ID NO: 860 - protein, 177 aa, synthetic construct
  source 1..177: note = HA-NLS-TCF4-(GS)3-RNF166 peptide
MYPYDVPDYAPAAKRVKLDGSGSGSDDLGANDELISFKDEGEQEEKSSENSSAERDLADVKSSLVNESETGSGSGSGLEAQYTCPICLEVYHRPVAIGSCGHTFCGECLQPCLQVPSPLCPLCRLPFDPKKVDKATHVEKQLSSYKAPCRGCNKKVTLAKMRVHISSCLKVQEQMAN

SEQ ID NO: 861 - protein, 179 aa, synthetic construct
  source 1..179: note = HA-NLS-TCF4-(GS)4-RNF166 peptide
MYPYDVPDYAPAAKRVKLDGSGSGSDDLGANDELISFKDEGEQEEKSSENSSAERDLADVKSSLVNESETGSGSGSGSGLEAQYTCPICLEVYHRPVAIGSCGHTFCGECLQPCLQVPSPLCPLCRLPFDPKKVDKATHVEKQLSSYKAPCRGCNKKVTLAKMRVHISSCLKVQEQMAN

SEQ ID NO: 862 - protein, 181 aa, synthetic construct
  source 1..181: note = HA-NLS-TCF4-(GS)5-RNF166 peptide
MYPYDVPDYAPAAKRVKLDGSGSGSDDLGANDELISFKDEGEQEEKSSENSSAERDLADVKSSLVNESETGSGSGSGSGSGLEAQYTCPICLEVYHRPVAIGSCGHTFCGECLQPCLQVPSPLCPLCRLPFDPKKVDKATHVEKQLSSYKAPCRGCNKKVTLAKMRVHISSCLKVQEQMAN

SEQ ID NO: 863 - protein, 183 aa, synthetic construct
  source 1..183: note = HA-NLS-TCF4-(GS)6-RNF166 peptide
MYPYDVPDYAPAAKRVKLDGSGSGSDDLGANDELISFKDEGEQEEKSSENSSAERDLADVKSSLVNESETGSGSGSGSGSGSGLEAQYTCPICLEVYHRPVAIGSCGHTFCGECLQPCLQVPSPLCPLCRLPFDPKKVDKATHVEKQLSSYKAPCRGCNKKVTLAKMRVHISSCLKVQEQMAN

SEQ ID NO: 864 - protein, 164 aa, synthetic construct
  source 1..164: note = RNF166-(GS)1-TCF4-NLS peptide
MGLEAQYTCPICLEVYHRPVAIGSCGHTFCGECLQPCLQVPSPLCPLCRLPFDPKKVDKATHVEKQLSSYKAPCRGCNKKVTLAKMRVHISSCLKVQEQMANGSDDLGANDELISFKDEGEQEEKSSENSSAERDLADVKSSLVNESETGSGSGSPAAKRVKLD

SEQ ID NO: 865 - protein, 166 aa, synthetic construct
  source 1..166: note = RNF166-(GS)2-TCF4-NLS peptide
MGLEAQYTCPICLEVYHRPVAIGSCGHTFCGECLQPCLQVPSPLCPLCRLPFDPKKVDKATHVEKQLSSYKAPCRGCNKKVTLAKMRVHISSCLKVQEQMANGSGSDDLGANDELISFKDEGEQEEKSSENSSAERDLADVKSSLVNESETGSGSGSPAAKRVKLD

SEQ ID NO: 866 - protein, 168 aa, synthetic construct
  source 1..168: note = RNF166-(GS)3-TCF4-NLS peptide
MGLEAQYTCPICLEVYHRPVAIGSCGHTFCGECLQPCLQVPSPLCPLCRLPFDPKKVDKATHVEKQLSSYKAPCRGCNKKVTLAKMRVHISSCLKVQEQMANGSGSGSDDLGANDELISFKDEGEQEEKSSENSSAERDLADVKSSLVNESETGSGSGSPAAKRVKLD

SEQ ID NO: 867 - protein, 170 aa, synthetic construct
  source 1..170: note = RNF166-(GS)4-TCF4-NLS peptide
MGLEAQYTCPICLEVYHRPVAIGSCGHTFCGECLQPCLQVPSPLCPLCRLPFDPKKVDKATHVEKQLSSYKAPCRGCNKKVTLAKMRVHISSCLKVQEQMANGSGSGSGSDDLGANDELISFKDEGEQEEKSSENSSAERDLADVKSSLVNESETGSGSGSPAAKRVKLD

SEQ ID NO: 868 - protein, 172 aa, synthetic construct
  source 1..172: note = RNF166-(GS)5-TCF4-NLS peptide
MGLEAQYTCPICLEVYHRPVAIGSCGHTFCGECLQPCLQVPSPLCPLCRLPFDPKKVDKATHVEKQLSSYKAPCRGCNKKVTLAKMRVHISSCLKVQEQMANGSGSGSGSGSDDLGANDELISFKDEGEQEEKSSENSSAERDLADVKSSLVNESETGSGSGSPAAKRVKLD

SEQ ID NO: 869 - protein, 174 aa, synthetic construct
  source 1..174: note = RNF166-(GS)6-TCF4-NLS peptide
MGLEAQYTCPICLEVYHRPVAIGSCGHTFCGECLQPCLQVPSPLCPLCRLPFDPKKVDKATHVEKQLSSYKAPCRGCNKKVTLAKMRVHISSCLKVQEQMANGSGSGSGSGSGSDDLGANDELISFKDEGEQEEKSSENSSAERDLADVKSSLVNESETGSGSGSPAAKRVKLD

SEQ ID NO: 870 - protein, 173 aa, synthetic construct
  source 1..173: note = RNF166-(GS)1-TCF4-NLS-HA peptide
MGLEAQYTCPICLEVYHRPVAIGSCGHTFCGECLQPCLQVPSPLCPLCRLPFDPKKVDKATHVEKQLSSYKAPCRGCNKKVTLAKMRVHISSCLKVQEQMANGSDDLGANDELISFKDEGEQEEKSSENSSAERDLADVKSSLVNESETGSGSGSPAAKRVKLDYPYDVPDYA

SEQ ID NO: 871 - protein, 175 aa, synthetic construct
  source 1..175: note = RNF166-(GS)2-TCF4-NLS-HA peptide
MGLEAQYTCPICLEVYHRPVAIGSCGHTFCGECLQPCLQVPSPLCPLCRLPFDPKKVDKATHVEKQLSSYKAPCRGCNKKVTLAKMRVHISSCLKVQEQMANGSGSDDLGANDELISFKDEGEQEEKSSENSSAERDLADVKSSLVNESETGSGSGSPAAKRVKLDYPYDVPDYA

SEQ ID NO: 872 - protein, 177 aa, synthetic construct
  source 1..177: note = RNF166-(GS)3-TCF4-NLS-HA peptide
MGLEAQYTCPICLEVYHRPVAIGSCGHTFCGECLQPCLQVPSPLCPLCRLPFDPKKVDKATHVEKQLSSYKAPCRGCNKKVTLAKMRVHISSCLKVQEQMANGSGSGSDDLGANDELISFKDEGEQEEKSSENSSAERDLADVKSSLVNESETGSGSGSPAAKRVKLDYPYDVPDYA

SEQ ID NO: 873 - protein, 179 aa, synthetic construct
  source 1..179: note = RNF166-(GS)4-TCF4-NLS-HA peptide
MGLEAQYTCPICLEVYHRPVAIGSCGHTFCGECLQPCLQVPSPLCPLCRLPFDPKKVDKATHVEKQLSSYKAPCRGCNKKVTLAKMRVHISSCLKVQEQMANGSGSGSGSDDLGANDELISFKDEGEQEEKSSENSSAERDLADVKSSLVNESETGSGSGSPAAKRVKLDYPYDVPDYA

SEQ ID NO: 874 - protein, 181 aa, synthetic construct
  source 1..181: note = RNF166-(GS)5-TCF4-NLS-HA peptide
MGLEAQYTCPICLEVYHRPVAIGSCGHTFCGECLQPCLQVPSPLCPLCRLPFDPKKVDKATHVEKQLSSYKAPCRGCNKKVTLAKMRVHISSCLKVQEQMANGSGSGSGSGSDDLGANDELISFKDEGEQEEKSSENSSAERDLADVKSSLVNESETGSGSGSPAAKRVKLDYPYDVPDYA

SEQ ID NO: 875 - protein, 183 aa, synthetic construct
  source 1..183: note = RNF166-(GS)6-TCF4-NLS-HA peptide
MGLEAQYTCPICLEVYHRPVAIGSCGHTFCGECLQPCLQVPSPLCPLCRLPFDPKKVDKATHVEKQLSSYKAPCRGCNKKVTLAKMRVHISSCLKVQEQMANGSGSGSGSGSGSDDLGANDELISFKDEGEQEEKSSENSSAERDLADVKSSLVNESETGSGSGSPAAKRVKLDYPYDVPDYA

SEQ ID NO: 876 - protein, 141 aa, synthetic construct
  source 1..141: note = NLS-TCF4-(GS)1-CBLb peptide
PAAKRVKLDGSGSGSDDLGANDELISFKDEGEQEEKSSENSSAERDLADVKSSLVNESETGSPHDHIKVTQEQYELECEMGSTFQLCKICAENDKDVKIEPCGHLMCTSCLTAWQESDGQGCPFCRCEIKGTEPIIVDPFD

SEQ ID NO: 877 - protein, 143 aa, synthetic construct
  source 1..143: note = NLS-TCF4-(GS)2-CBLb peptide
PAAKRVKLDGSGSGSDDLGANDELISFKDEGEQEEKSSENSSAERDLADVKSSLVNESETGSGSPHDHIKVTQEQYELECEMGSTFQLCKICAENDKDVKIEPCGHLMCTSCLTAWQESDGQGCPFCRCEIKGTEPIIVDPFD

SEQ ID NO: 878 - protein, 145 aa, synthetic construct
  source 1..145: note = NLS-TCF4-(GS)3-CBLb peptide
PAAKRVKLDGSGSGSDDLGANDELISFKDEGEQEEKSSENSSAERDLADVKSSLVNESETGSGSGSPHDHIKVTQEQYELECEMGSTFQLCKICAENDKDVKIEPCGHLMCTSCLTAWQESDGQGCPFCRCEIKGTEPIIVDPFD

SEQ ID NO: 879 - protein, 147 aa, synthetic construct
  source 1..147: note = NLS-TCF4-(GS)4-CBLb peptide
PAAKRVKLDGSGSGSDDLGANDELISFKDEGEQEEKSSENSSAERDLADVKSSLVNESETGSGSGSGSPHDHIKVTQEQYELECEMGSTFQLCKICAENDKDVKIEPCGHLMCTSCLTAWQESDGQGCPFCRCEIKGTEPIIVDPFD

SEQ ID NO: 880 - protein, 149 aa, synthetic construct
  source 1..149: note = NLS-TCF4-(GS)5-CBLb peptide
PAAKRVKLDGSGSGSDDLGANDELISFKDEGEQEEKSSENSSAERDLADVKSSLVNESETGSGSGSGSGSPHDHIKVTQEQYELECEMGSTFQLCKICAENDKDVKIEPCGHLMCTSCLTAWQESDGQGCPFCRCEIKGTEPIIVDPFD

SEQ ID NO: 881 - protein, 151 aa, synthetic construct
  source 1..151: note = NLS-TCF4-(GS)6-CBLb peptide
PAAKRVKLDGSGSGSDDLGANDELISFKDEGEQEEKSSENSSAERDLADVKSSLVNESETGSGSGSGSGSGSPHDHIKVTQEQYELECEMGSTFQLCKICAENDKDVKIEPCGHLMCTSCLTAWQESDGQGCPFCRCEIKGTEPIIVDPFD

SEQ ID NO: 882 - protein, 151 aa, synthetic construct
  source 1..151: note = HA-NLS-TCF4-(GS)1-CBLb peptide
MYPYDVPDYAPAAKRVKLDGSGSGSDDLGANDELISFKDEGEQEEKSSENSSAERDLADVKSSLVNESETGSPHDHIKVTQEQYELECEMGSTFQLCKICAENDKDVKIEPCGHLMCTSCLTAWQESDGQGCPFCRCEIKGTEPIIVDPFD

SEQ ID NO: 883 - protein, 153 aa, synthetic construct
  source 1..153: note = HA-NLS-TCF4-(GS)2-CBLb peptide
MYPYDVPDYAPAAKRVKLDGSGSGSDDLGANDELISFKDEGEQEEKSSENSSAERDLADVKSSLVNESETGSGSPHDHIKVTQEQYELECEMGSTFQLCKICAENDKDVKIEPCGHLMCTSCLTAWQESDGQGCPFCRCEIKGTEPIIVDPFD

SEQ ID NO: 884 - protein, 155 aa, synthetic construct
  source 1..155: note = HA-NLS-TCF4-(GS)3-CBLb peptide
MYPYDVPDYAPAAKRVKLDGSGSGSDDLGANDELISFKDEGEQEEKSSENSSAERDLADVKSSLVNESETGSGSGSPHDHIKVTQEQYELECEMGSTFQLCKICAENDKDVKIEPCGHLMCTSCLTAWQESDGQGCPFCRCEIKGTEPIIVDPFD

SEQ ID NO: 885 - protein, 157 aa, synthetic construct
  source 1..157: note = HA-NLS-TCF4-(GS)4-CBLb peptide
MYPYDVPDYAPAAKRVKLDGSGSGSDDLGANDELISFKDEGEQEEKSSENSSAERDLADVKSSLVNESETGSGSGSGSPHDHIKVTQEQYELECEMGSTFQLCKICAENDKDVKIEPCGHLMCTSCLTAWQESDGQGCPFCRCEIKGTEPIIVDPFD

SEQ ID NO: 886 - protein, 159 aa, synthetic construct
  source 1..159: note = HA-NLS-TCF4-(GS)5-CBLb peptide
MYPYDVPDYAPAAKRVKLDGSGSGSDDLGANDELISFKDEGEQEEKSSENSSAERDLADVKSSLVNESETGSGSGSGSGSPHDHIKVTQEQYELECEMGSTFQLCKICAENDKDVKIEPCGHLMCTSCLTAWQESDGQGCPFCRCEIKGTEPIIVDPFD

SEQ ID NO: 887 - protein, 161 aa, synthetic construct
  source 1..161: note = HA-NLS-TCF4-(GS)6-CBLb peptide
MYPYDVPDYAPAAKRVKLDGSGSGSDDLGANDELISFKDEGEQEEKSSENSSAERDLADVKSSLVNESETGSGSGSGSGSGSPHDHIKVTQEQYELECEMGSTFQLCKICAENDKDVKIEPCGHLMCTSCLTAWQESDGQGCPFCRCEIKGTEPIIVDPFD

SEQ ID NO: 888 - protein, 142 aa, synthetic construct
  source 1..142: note = CBLb-(GS)1-TCF4-NLS peptide
MPHDHIKVTQEQYELECEMGSTFQLCKICAENDKDVKIEPCGHLMCTSCLTAWQESDGQGCPFCRCEIKGTEPIIVDPFDGSDDLGANDELISFKDEGEQEEKSSENSSAERDLADVKSSLVNESETGSGSGSPAAKRVKLD

SEQ ID NO: 889 - protein, 144 aa, synthetic construct
  source 1..144: note = CBLb-(GS)2-TCF4-NLS peptide
MPHDHIKVTQEQYELECEMGSTFQLCKICAENDKDVKIEPCGHLMCTSCLTAWQESDGQGCPFCRCEIKGTEPIIVDPFDGSGSDDLGANDELISFKDEGEQEEKSSENSSAERDLADVKSSLVNESETGSGSGSPAAKRVKLD

SEQ ID NO: 890 - protein, 146 aa, synthetic construct
  source 1..146: note = CBLb-(GS)3-TCF4-NLS peptide
MPHDHIKVTQEQYELECEMGSTFQLCKICAENDKDVKIEPCGHLMCTSCLTAWQESDGQGCPFCRCEIKGTEPIIVDPFDGSGSGSDDLGANDELISFKDEGEQEEKSSENSSAERDLADVKSSLVNESETGSGSGSPAAKRVKLD

SEQ ID NO: 891 - protein, 148 aa, synthetic construct
  source 1..148: note = CBLb-(GS)4-TCF4-NLS peptide
MPHDHIKVTQEQYELECEMGSTFQLCKICAENDKDVKIEPCGHLMCTSCLTAWQESDGQGCPFCRCEIKGTEPIIVDPFDGSGSGSGSDDLGANDELISFKDEGEQEEKSSENSSAERDLADVKSSLVNESETGSGSGSPAAKRVKLD

SEQ ID NO: 892 - protein, 150 aa, synthetic construct
  source 1..150: note = CBLb-(GS)5-TCF4-NLS peptide
MPHDHIKVTQEQYELECEMGSTFQLCKICAENDKDVKIEPCGHLMCTSCLTAWQESDGQGCPFCRCEIKGTEPIIVDPFDGSGSGSGSGSDDLGANDELISFKDEGEQEEKSSENSSAERDLADVKSSLVNESETGSGSGSPAAKRVKLD

SEQ ID NO: 893 - protein, 152 aa, synthetic construct
  source 1..152: note = CBLb-(GS)6-TCF4-NLS peptide
MPHDHIKVTQEQYELECEMGSTFQLCKICAENDKDVKIEPCGHLMCTSCLTAWQESDGQGCPFCRCEIKGTEPIIVDPFDGSGSGSGSGSGSDDLGANDELISFKDEGEQEEKSSENSSAERDLADVKSSLVNESETGSGSGSPAAKRVKLD

SEQ ID NO: 894 - protein, 151 aa, synthetic construct
  source 1..151: note = CBLb-(GS)1-TCF4-NLS-HA peptide
MPHDHIKVTQEQYELECEMGSTFQLCKICAENDKDVKIEPCGHLMCTSCLTAWQESDGQGCPFCRCEIKGTEPIIVDPFDGSDDLGANDELISFKDEGEQEEKSSENSSAERDLADVKSSLVNESETGSGSGSPAAKRVKLDYPYDVPDYA

SEQ ID NO: 895 - protein, 153 aa, synthetic construct
  source 1..153: note = CBLb-(GS)2-TCF4-NLS-HA peptide
MPHDHIKVTQEQYELECEMGSTFQLCKICAENDKDVKIEPCGHLMCTSCLTAWQESDGQGCPFCRCEIKGTEPIIVDPFDGSGSDDLGANDELISFKDEGEQEEKSSENSSAERDLADVKSSLVNESETGSGSGSPAAKRVKLDYPYDVPDYA

SEQ ID NO: 896 - protein, 155 aa, synthetic construct
  source 1..155: note = CBLb-(GS)3-TCF4-NLS-HA peptide
MPHDHIKVTQEQYELECEMGSTFQLCKICAENDKDVKIEPCGHLMCTSCLTAWQESDGQGCPFCRCEIKGTEPIIVDPFDGSGSGSDDLGANDELISFKDEGEQEEKSSENSSAERDLADVKSSLVNESETGSGSGSPAAKRVKLDYPYDVPDYA

SEQ ID NO: 897 - protein, 157 aa, synthetic construct
  source 1..157: note = CBLb-(GS)4-TCF4-NLS-HA peptide
MPHDHIKVTQEQYELECEMGSTFQLCKICAENDKDVKIEPCGHLMCTSCLTAWQESDGQGCPFCRCEIKGTEPIIVDPFDGSGSGSGSDDLGANDELISFKDEGEQEEKSSENSSAERDLADVKSSLVNESETGSGSGSPAAKRVKLDYPYDVPDYA

SEQ ID NO: 898 - protein, 159 aa, synthetic construct
  source 1..159: note = CBLb-(GS)5-TCF4-NLS-HA peptide
MPHDHIKVTQEQYELECEMGSTFQLCKICAENDKDVKIEPCGHLMCTSCLTAWQESDGQGCPFCRCEIKGTEPIIVDPFDGSGSGSGSGSDDLGANDELISFKDEGEQEEKSSENSSAERDLADVKSSLVNESETGSGSGSPAAKRVKLDYPYDVPDYA

SEQ ID NO: 899 - protein, 161 aa, synthetic construct
  source 1..161: note = CBLb-(GS)6-TCF4-NLS-HA peptide
MPHDHIKVTQEQYELECEMGSTFQLCKICAENDKDVKIEPCGHLMCTSCLTAWQESDGQGCPFCRCEIKGTEPIIVDPFDGSGSGSGSGSGSDDLGANDELISFKDEGEQEEKSSENSSAERDLADVKSSLVNESETGSGSGSPAAKRVKLDYPYDVPDYA

SEQ ID NO: 900 - protein, 154 aa, synthetic construct
  source 1..154: note = NLS-TCF4-(GS)1-NHLRC1 peptide
PAAKRVKLDGSGSGSDDLGANDELISFKDEGEQEEKSSENSSAERDLADVKSSLVNESETGSESGPALHELMREAEISLLECKVCFEKFGHRQQRRPRNLSCGHVVCLACVAALAHPRTLALECPFCRRACRGCDTSDCLPVLHLIELLGSALR

SEQ ID NO: 901 - protein, 156 aa, synthetic construct
  source 1..156: note = NLS-TCF4-(GS)2-NHLRC1 peptide
PAAKRVKLDGSGSGSDDLGANDELISFKDEGEQEEKSSENSSAERDLADVKSSLVNESETGSGSESGPALHELMREAEISLLECKVCFEKFGHRQQRRPRNLSCGHVVCLACVAALAHPRTLALECPFCRRACRGCDTSDCLPVLHLIELLGSALR

SEQ ID NO: 902 - protein, 158 aa, synthetic construct
  source 1..158: note = NLS-TCF4-(GS)3-NHLRC1 peptide
PAAKRVKLDGSGSGSDDLGANDELISFKDEGEQEEKSSENSSAERDLADVKSSLVNESETGSGSGSESGPALHELMREAEISLLECKVCFEKFGHRQQRRPRNLSCGHVVCLACVAALAHPRTLALECPFCRRACRGCDTSDCLPVLHLIELLGSALR

SEQ ID NO: 903 - protein, 160 aa, synthetic construct
  source 1..160: note = NLS-TCF4-(GS)4-NHLRC1 peptide
PAAKRVKLDGSGSGSDDLGANDELISFKDEGEQEEKSSENSSAERDLADVKSSLVNESETGSGSGSGSESGPALHELMREAEISLLECKVCFEKFGHRQQRRPRNLSCGHVVCLACVAALAHPRTLALECPFCRRACRGCDTSDCLPVLHLIELLGSALR

SEQ ID NO: 904 - protein, 162 aa, synthetic construct
  source 1..162: note = NLS-TCF4-(GS)5-NHLRC1 peptide
PAAKRVKLDGSGSGSDDLGANDELISFKDEGEQEEKSSENSSAERDLADVKSSLVNESETGSGSGSGSGSESGPALHELMREAEISLLECKVCFEKFGHRQQRRPRNLSCGHVVCLACVAALAHPRTLALECPFCRRACRGCDTSDCLPVLHLIELLGSALR

SEQ ID NO: 905 - protein, 164 aa, synthetic construct
  source 1..164: note = NLS-TCF4-(GS)6-NHLRC1 peptide
PAAKRVKLDGSGSGSDDLGANDELISFKDEGEQEEKSSENSSAERDLADVKSSLVNESETGSGSGSGSGSGSESGPALHELMREAEISLLECKVCFEKFGHRQQRRPRNLSCGHVVCLACVAALAHPRTLALECPFCRRACRGCDTSDCLPVLHLIELLGSALR

SEQ ID NO: 906 - protein, 164 aa, synthetic construct
  source 1..164: note = HA-NLS-TCF4-(GS)1-NHLRC1 peptide
MYPYDVPDYAPAAKRVKLDGSGSGSDDLGANDELISFKDEGEQEEKSSENSSAERDLADVKSSLVNESETGSESGPALHELMREAEISLLECKVCFEKFGHRQQRRPRNLSCGHVVCLACVAALAHPRTLALECPFCRRACRGCDTSDCLPVLHLIELLGSALR

SEQ ID NO: 907 - protein, 166 aa, synthetic construct
  source 1..166: note = HA-NLS-TCF4-(GS)2-NHLRC1 peptide
MYPYDVPDYAPAAKRVKLDGSGSGSDDLGANDELISFKDEGEQEEKSSENSSAERDLADVKSSLVNESETGSGSESGPALHELMREAEISLLECKVCFEKFGHRQQRRPRNLSCGHVVCLACVAALAHPRTLALECPFCRRACRGCDTSDCLPVLHLIELLGSALR

SEQ ID NO: 908 - protein, 168 aa, synthetic construct
  source 1..168: note = HA-NLS-TCF4-(GS)3-NHLRC1 peptide
MYPYDVPDYAPAAKRVKLDGSGSGSDDLGANDELISFKDEGEQEEKSSENSSAERDLADVKSSLVNESETGSGSGSESGPALHELMREAEISLLECKVCFEKFGHRQQRRPRNLSCGHVVCLACVAALAHPRTLALECPFCRRACRGCDTSDCLPVLHLIELLGSALR

SEQ ID NO: 909 - protein, 170 aa, synthetic construct
  source 1..170: note = HA-NLS-TCF4-(GS)4-NHLRC1 peptide
MYPYDVPDYAPAAKRVKLDGSGSGSDDLGANDELISFKDEGEQEEKSSENSSAERDLADVKSSLVNESETGSGSGSGSESGPALHELMREAEISLLECKVCFEKFGHRQQRRPRNLSCGHVVCLACVAALAHPRTLALECPFCRRACRGCDTSDCLPVLHLIELLGSALR

SEQ ID NO: 910 - protein, 172 aa, synthetic construct
  source 1..172: note = HA-NLS-TCF4-(GS)5-NHLRC1 peptide
MYPYDVPDYAPAAKRVKLDGSGSGSDDLGANDELISFKDEGEQEEKSSENSSAERDLADVKSSLVNESETGSGSGSGSGSESGPALHELMREAEISLLECKVCFEKFGHRQQRRPRNLSCGHVVCLACVAALAHPRTLALECPFCRRACRGCDTSDCLPVLHLIELLGSALR

SEQ ID NO: 911 - protein, 174 aa, synthetic construct
  source 1..174: note = HA-NLS-TCF4-(GS)6-NHLRC1 peptide
MYPYDVPDYAPAAKRVKLDGSGSGSDDLGANDELISFKDEGEQEEKSSENSSAERDLADVKSSLVNESETGSGSGSGSGSGSESGPALHELMREAEISLLECKVCFEKFGHRQQRRPRNLSCGHVVCLACVAALAHPRTLALECPFCRRACRGCDTSDCLPVLHLIELLGSALR

SEQ ID NO: 912 - protein, 155 aa, synthetic construct
  source 1..155: note = NHLRC1-(GS)1-TCF4-NLS peptide
MESGPALHELMREAEISLLECKVCFEKFGHRQQRRPRNLSCGHVVCLACVAALAHPRTLALECPFCRRACRGCDTSDCLPVLHLIELLGSALRGSDDLGANDELISFKDEGEQEEKSSENSSAERDLADVKSSLVNESETGSGSGSPAAKRVKLD

SEQ ID NO: 913 - protein, 157 aa, synthetic construct
  source 1..157: note = NHLRC1-(GS)2-TCF4-NLS peptide
MESGPALHELMREAEISLLECKVCFEKFGHRQQRRPRNLSCGHVVCLACVAALAHPRTLALECPFCRRACRGCDTSDCLPVLHLIELLGSALRGSGSDDLGANDELISFKDEGEQEEKSSENSSAERDLADVKSSLVNESETGSGSGSPAAKRVKLD

SEQ ID NO: 914 - protein, 159 aa, synthetic construct
  source 1..159: note = NHLRC1-(GS)3-TCF4-NLS peptide
MESGPALHELMREAEISLLECKVCFEKFGHRQQRRPRNLSCGHVVCLACVAALAHPRTLALECPFCRRACRGCDTSDCLPVLHLIELLGSALRGSGSGSDDLGANDELISFKDEGEQEEKSSENSSAERDLADVKSSLVNESETGSGSGSPAAKRVKLD

SEQ ID NO: 915 - protein, 161 aa, synthetic construct
  source 1..161: note = NHLRC1-(GS)4-TCF4-NLS peptide
MESGPALHELMREAEISLLECKVCFEKFGHRQQRRPRNLSCGHVVCLACVAALAHPRTLALECPFCRRACRGCDTSDCLPVLHLIELLGSALRGSGSGSGSDDLGANDELISFKDEGEQEEKSSENSSAERDLADVKSSLVNESETGSGSGSPAAKRVKLD

SEQ ID NO: 916 - protein, 163 aa, synthetic construct
  source 1..163: note = NHLRC1-(GS)5-TCF4-NLS peptide
MESGPALHELMREAEISLLECKVCFEKFGHRQQRRPRNLSCGHVVCLACVAALAHPRTLALECPFCRRACRGCDTSDCLPVLHLIELLGSALRGSGSGSGSGSDDLGANDELISFKDEGEQEEKSSENSSAERDLADVKSSLVNESETGSGSGSPAAKRVKLD

SEQ ID NO: 917 - protein, 165 aa, synthetic construct
  source 1..165: note = NHLRC1-(GS)6-TCF4-NLS peptide
MESGPALHELMREAEISLLECKVCFEKFGHRQQRRPRNLSCGHVVCLACVAALAHPRTLALECPFCRRACRGCDTSDCLPVLHLIELLGSALRGSGSGSGSGSGSDDLGANDELISFKDEGEQEEKSSENSSAERDLADVKSSLVNESETGSGSGSPAAKRVKLD

SEQ ID NO: 918 - protein, 164 aa, synthetic construct
  source 1..164: note = NHLRC1-(GS)1-TCF4-NLS-HA peptide
MESGPALHELMREAEISLLECKVCFEKFGHRQQRRPRNLSCGHVVCLACVAALAHPRTLALECPFCRRACRGCDTSDCLPVLHLIELLGSALRGSDDLGANDELISFKDEGEQEEKSSENSSAERDLADVKSSLVNESETGSGSGSPAAKRVKLDYPYDVPDYA

SEQ ID NO: 919 - protein, 166 aa, synthetic construct
  source 1..166: note = NHLRC1-(GS)2-TCF4-NLS-HA peptide
MESGPALHELMREAEISLLECKVCFEKFGHRQQRRPRNLSCGHVVCLACVAALAHPRTLALECPFCRRACRGCDTSDCLPVLHLIELLGSALRGSGSDDLGANDELISFKDEGEQEEKSSENSSAERDLADVKSSLVNESETGSGSGSPAAKRVKLDYPYDVPDYA

SEQ ID NO: 920 - protein, 168 aa, synthetic construct
  source 1..168: note = NHLRC1-(GS)3-TCF4-NLS-HA peptide
MESGPALHELMREAEISLLECKVCFEKFGHRQQRRPRNLSCGHVVCLACVAALAHPRTLALECPFCRRACRGCDTSDCLPVLHLIELLGSALRGSGSGSDDLGANDELISFKDEGEQEEKSSENSSAERDLADVKSSLVNESETGSGSGSPAAKRVKLDYPYDVPDYA

SEQ ID NO: 921 - protein, 170 aa, synthetic construct
  source 1..170: note = NHLRC1-(GS)4-TCF4-NLS-HA peptide
MESGPALHELMREAEISLLECKVCFEKFGHRQQRRPRNLSCGHVVCLACVAALAHPRTLALECPFCRRACRGCDTSDCLPVLHLIELLGSALRGSGSGSGSDDLGANDELISFKDEGEQEEKSSENSSAERDLADVKSSLVNESETGSGSGSPAAKRVKLDYPYDVPDYA

SEQ ID NO: 922 - protein, 172 aa, synthetic construct
  source 1..172: note = NHLRC1-(GS)5-TCF4-NLS-HA peptide
MESGPALHELMREAEISLLECKVCFEKFGHRQQRRPRNLSCGHVVCLACVAALAHPRTLALECPFCRRACRGCDTSDCLPVLHLIELLGSALRGSGSGSGSGSDDLGANDELISFKDEGEQEEKSSENSSAERDLADVKSSLVNESETGSGSGSPAAKRVKLDYPYDVPDYA

SEQ ID NO: 923 - protein, 174 aa, synthetic construct
  source 1..174: note = NHLRC1-(GS)6-TCF4-NLS-HA peptide
MESGPALHELMREAEISLLECKVCFEKFGHRQQRRPRNLSCGHVVCLACVAALAHPRTLALECPFCRRACRGCDTSDCLPVLHLIELLGSALRGSGSGSGSGSGSDDLGANDELISFKDEGEQEEKSSENSSAERDLADVKSSLVNESETGSGSGSPAAKRVKLDYPYDVPDYA

SEQ ID NO: 924 - protein, 337 aa, synthetic construct
  source 1..337: note = TRIM21-TCF4-NLS peptide
MASAARLTMMWEEVTCPICLDPFVEPVSIECGHSFCQECISQVGKGGGSVCPVCRQRFLLKNLRPNRQLANMVNNLKEISQEAREGTQGERCAVHGERLHLFCEKDGKALCWVCAQSRKHRDHAMVPLEEAAQEYQEKLQVALGELRRKQELAEKLEVEIAIKRADWKKTVETQKSRIHAEFVQQKNFLVEEEQRQLQELEKDEREQLRILGEKEAKLAQQSQALQELISELDRRCHSSALELLQEVIIVLERSESWNLKDLDITSPELRSVCHVPGDDLGANDELISFKDEGEQEEKSSENSSAERDLADVKSSLVNESETGSGSGSPAAKRVKLD

SEQ ID NO: 925 - protein, 339 aa, synthetic construct
  source 1..339: note = TRIM21-(GS)1-TCF4-NLS peptide
MASAARLTMMWEEVTCPICLDPFVEPVSIECGHSFCQECISQVGKGGGSVCPVCRQRFLLKNLRPNRQLANMVNNLKEISQEAREGTQGERCAVHGERLHLFCEKDGKALCWVCAQSRKHRDHAMVPLEEAAQEYQEKLQVALGELRRKQELAEKLEVEIAIKRADWKKTVETQKSRIHAEFVQQKNFLVEEEQRQLQELEKDEREQLRILGEKEAKLAQQSQALQELISELDRRCHSSALELLQEVIIVLERSESWNLKDLDITSPELRSVCHVPGGSDDLGANDELISFKDEGEQEEKSSENSSAERDLADVKSSLVNESETGSGSGSPAAKRVKLD

SEQ ID NO: 926 - protein, 341 aa, synthetic construct
  source 1..341: note = TRIM21-(GS)2-TCF4-NLS peptide
MASAARLTMMWEEVTCPICLDPFVEPVSIECGHSFCQECISQVGKGGGSVCPVCRQRFLLKNLRPNRQLANMVNNLKEISQEAREGTQGERCAVHGERLHLFCEKDGKALCWVCAQSRKHRDHAMVPLEEAAQEYQEKLQVALGELRRKQELAEKLEVEIAIKRADWKKTVETQKSRIHAEFVQQKNFLVEEEQRQLQELEKDEREQLRILGEKEAKLAQQSQALQELISELDRRCHSSALELLQEVIIVLERSESWNLKDLDITSPELRSVCHVPGGSGSDDLGANDELISFKDEGEQEEKSSENSSAERDLADVKSSLVNESETGSGSGSPAAKRVKLD

SEQ ID NO: 927 - protein, 343 aa, synthetic construct
  source 1..343: note = TRIM21-(GS)3-TCF4-NLS peptide
MASAARLTMMWEEVTCPICLDPFVEPVSIECGHSFCQECISQVGKGGGSVCPVCRQRFLLKNLRPNRQLANMVNNLKEISQEAREGTQGERCAVHGERLHLFCEKDGKALCWVCAQSRKHRDHAMVPLEEAAQEYQEKLQVALGELRRKQELAEKLEVEIAIKRADWKKTVETQKSRIHAEFVQQKNFLVEEEQRQLQELEKDEREQLRILGEKEAKLAQQSQALQELISELDRRCHSSALELLQEVIIVLERSESWNLKDLDITSPELRSVCHVPGGSGSGSDDLGANDELISFKDEGEQEEKSSENSSAERDLADVKSSLVNESETGSGSGSPAAKRVKLD

SEQ ID NO: 928 - protein, 345 aa, synthetic construct
  source 1..345: note = TRIM21-(GS)4-TCF4-NLS peptide
MASAARLTMMWEEVTCPICLDPFVEPVSIECGHSFCQECISQVGKGGGSVCPVCRQRFLLKNLRPNRQLANMVNNLKEISQEAREGTQGERCAVHGERLHLFCEKDGKALCWVCAQSRKHRDHAMVPLEEAAQEYQEKLQVALGELRRKQELAEKLEVEIAIKRADWKKTVETQKSRIHAEFVQQKNFLVEEEQRQLQELEKDEREQLRILGEKEAKLAQQSQALQELISELDRRCHSSALELLQEVIIVLERSESWNLKDLDITSPELRSVCHVPGGSGSGSGSDDLGANDELISFKDEGEQEEKSSENSSAERDLADVKSSLVNESETGSGSGSPAAKRVKLD

SEQ ID NO: 929 - protein, 347 aa, synthetic construct
  source 1..347: note = TRIM21-(GS)5-TCF4-NLS peptide
MASAARLTMMWEEVTCPICLDPFVEPVSIECGHSFCQECISQVGKGGGSVCPVCRQRFLLKNLRPNRQLANMVNNLKEISQEAREGTQGERCAVHGERLHLFCEKDGKALCWVCAQSRKHRDHAMVPLEEAAQEYQEKLQVALGELRRKQELAEKLEVEIAIKRADWKKTVETQKSRIHAEFVQQKNFLVEEEQRQLQELEKDEREQLRILGEKEAKLAQQSQALQELISELDRRCHSSALELLQEVIIVLERSESWNLKDLDITSPELRSVCHVPGGSGSGSGSGSDDLGANDELISFKDEGEQEEKSSENSSAERDLADVKSSLVNESETGSGSGSPAAKRVKLD

SEQ ID NO: 930 - protein, 349 aa, synthetic construct
  source 1..349: note = TRIM21-(GS)6-TCF4-NLS peptide
MASAARLTMMWEEVTCPICLDPFVEPVSIECGHSFCQECISQVGKGGGSVCPVCRQRFLLKNLRPNRQLANMVNNLKEISQEAREGTQGERCAVHGERLHLFCEKDGKALCWVCAQSRKHRDHAMVPLEEAAQEYQEKLQVALGELRRKQELAEKLEVEIAIKRADWKKTVETQKSRIHAEFVQQKNFLVEEEQRQLQELEKDEREQLRILGEKEAKLAQQSQALQELISELDRRCHSSALELLQEVIIVLERSESWNLKDLDITSPELRSVCHVPGGSGSGSGSGSGSDDLGANDELISFKDEGEQEEKSSENSSAERDLADVKSSLVNESETGSGSGSPAAKRVKLD

SEQ ID NO: 931 - protein, 346 aa, synthetic construct
  source 1..346: note = TRIM21-TCF4-NLS-HA peptide
MASAARLTMMWEEVTCPICLDPFVEPVSIECGHSFCQECISQVGKGGGSVCPVCRQRFLLKNLRPNRQLANMVNNLKEISQEAREGTQGERCAVHGERLHLFCEKDGKALCWVCAQSRKHRDHAMVPLEEAAQEYQEKLQVALGELRRKQELAEKLEVEIAIKRADWKKTVETQKSRIHAEFVQQKNFLVEEEQRQLQELEKDEREQLRILGEKEAKLAQQSQALQELISELDRRCHSSALELLQEVIIVLERSESWNLKDLDITSPELRSVCHVPGDDLGANDELISFKDEGEQEEKSSENSSAERDLADVKSSLVNESETGSGSGSPAAKRVKLDYPYDVPDYA

SEQ ID NO: 932 - protein, 348 aa, synthetic construct
  source 1..348: note = TRIM21-(GS)1-TCF4-NLS-HA peptide
MASAARLTMMWEEVTCPICLDPFVEPVSIECGHSFCQECISQVGKGGGSVCPVCRQRFLLKNLRPNRQLANMVNNLKEISQEAREGTQGERCAVHGERLHLFCEKDGKALCWVCAQSRKHRDHAMVPLEEAAQEYQEKLQVALGELRRKQELAEKLEVEIAIKRADWKKTVETQKSRIHAEFVQQKNFLVEEEQRQLQELEKDEREQLRILGEKEAKLAQQSQALQELISELDRRCHSSALELLQEVIIVLERSESWNLKDLDITSPELRSVCHVPGGSDDLGANDELISFKDEGEQEEKSSENSSAERDLADVKSSLVNESETGSGSGSPAAKRVKLDYPYDVPDYA

SEQ ID NO: 933 - protein, 350 aa, synthetic construct
  source 1..350: note = TRIM21-(GS)2-TCF4-NLS-HA peptide
MASAARLTMMWEEVTCPICLDPFVEPVSIECGHSFCQECISQVGKGGGSVCPVCRQRFLLKNLRPNRQLANMVNNLKEISQEAREGTQGERCAVHGERLHLFCEKDGKALCWVCAQSRKHRDHAMVPLEEAAQEYQEKLQVALGELRRKQELAEKLEVEIAIKRADWKKTVETQKSRIHAEFVQQKNFLVEEEQRQLQELEKDEREQLRILGEKEAKLAQQSQALQELISELDRRCHSSALELLQEVIIVLERSESWNLKDLDITSPELRSVCHVPGGSGSDDLGANDELISFKDEGEQEEKSSENSSAERDLADVKSSLVNESETGSGSGSPAAKRVKLDYPYDVPDYA

SEQ ID NO: 934 - protein, 352 aa, synthetic construct
  source 1..352: note = TRIM21-(GS)3-TCF4-NLS-HA peptide
MASAARLTMMWEEVTCPICLDPFVEPVSIECGHSFCQECISQVGKGGGSVCPVCRQRFLLKNLRPNRQLANMVNNLKEISQEAREGTQGERCAVHGERLHLFCEKDGKALCWVCAQSRKHRDHAMVPLEEAAQEYQEKLQVALGELRRKQELAEKLEVEIAIKRADWKKTVETQKSRIHAEFVQQKNFLVEEEQRQLQELEKDEREQLRILGEKEAKLAQQSQALQELISELDRRCHSSALELLQEVIIVLERSESWNLKDLDITSPELRSVCHVPGGSGSGSDDLGANDELISFKDEGEQEEKSSENSSAERDLADVKSSLVNESETGSGSGSPAAKRVKLDYPYDVPDYA

SEQ ID NO: 935 - protein, 354 aa, synthetic construct
  source 1..354: note = TRIM21-(GS)4-TCF4-NLS-HA peptide
MASAARLTMMWEEVTCPICLDPFVEPVSIECGHSFCQECISQVGKGGGSVCPVCRQRFLLKNLRPNRQLANMVNNLKEISQEAREGTQGERCAVHGERLHLFCEKDGKALCWVCAQSRKHRDHAMVPLEEAAQEYQEKLQVALGELRRKQELAEKLEVEIAIKRADWKKTVETQKSRIHAEFVQQKNFLVEEEQRQLQELEKDEREQLRILGEKEAKLAQQSQALQELISELDRRCHSSALELLQEVIIVLERSESWNLKDLDITSPELRSVCHVPGGSGSGSGSDDLGANDELISFKDEGEQEEKSSENSSAERDLADVKSSLVNESETGSGSGSPAAKRVKLDYPYDVPDYA

SEQ ID NO: 936 - protein, 356 aa, synthetic construct
  source 1..356: note = TRIM21-(GS)5-TCF4-NLS-HA peptide
MASAARLTMMWEEVTCPICLDPFVEPVSIECGHSFCQECISQVGKGGGSVCPVCRQRFLLKNLRPNRQLANMVNNLKEISQEAREGTQGERCAVHGERLHLFCEKDGKALCWVCAQSRKHRDHAMVPLEEAAQEYQEKLQVALGELRRKQELAEKLEVEIAIKRADWKKTVETQKSRIHAEFVQQKNFLVEEEQRQLQELEKDEREQLRILGEKEAKLAQQSQALQELISELDRRCHSSALELLQEVIIVLERSESWNLKDLDITSPELRSVCHVPGGSGSGSGSGSDDLGANDELISFKDEGEQEEKSSENSSAERDLADVKSSLVNESETGSGSGSPAAKRVKLDYPYDVPDYA

SEQ ID NO: 937 - protein, 358 aa, synthetic construct
  source 1..358: note = TRIM21-(GS)6-TCF4-NLS-HA peptide
MASAARLTMMWEEVTCPICLDPFVEPVSIECGHSFCQECISQVGKGGGSVCPVCRQRFLLKNLRPNRQLANMVNNLKEISQEAREGTQGERCAVHGERLHLFCEKDGKALCWVCAQSRKHRDHAMVPLEEAAQEYQEKLQVALGELRRKQELAEKLEVEIAIKRADWKKTVETQKSRIHAEFVQQKNFLVEEEQRQLQELEKDEREQLRILGEKEAKLAQQSQALQELISELDRRCHSSALELLQEVIIVLERSESWNLKDLDITSPELRSVCHVPGGSGSGSGSGSGSDDLGANDELISFKDEGEQEEKSSENSSAERDLADVKSSLVNESETGSGSGSPAAKRVKLDYPYDVPDYA

SEQ ID NO: 938 - protein, 228 aa, synthetic construct
  source 1..228: note = TCF4-(GS)1-CHIP peptide
MDDLGANDELISFKDEGEQEEKSSENSSAERDLADVKSSLVNESETGSRLNFGDDIPSALRIAKKKRWNSIEERRIHQESELHSYLSRLIAAERERELEECQRNHEGDEDDSHVRAQQACIEAKHDKYMADMDELFSQVDEKRKKRDIPDYLCGKISFELMREPCITPSGITYDRKDIEEHLQRVGHFDPVTRSPLTQEQLIPNLAMKEVIDAFISENGWVEDYGSGS

SEQ ID NO: 939 - protein, 230 aa, synthetic construct
  source 1..230: note = TCF4-(GS)2-CHIP peptide
MDDLGANDELISFKDEGEQEEKSSENSSAERDLADVKSSLVNESETGSGSRLNFGDDIPSALRIAKKKRWNSIEERRIHQESELHSYLSRLIAAERERELEECQRNHEGDEDDSHVRAQQACIEAKHDKYMADMDELFSQVDEKRKKRDIPDYLCGKISFELMREPCITPSGITYDRKDIEEHLQRVGHFDPVTRSPLTQEQLIPNLAMKEVIDAFISENGWVEDYGSGS

SEQ ID NO: 940 - protein, 232 aa, synthetic construct
  source 1..232: note = TCF4-(GS)3-CHIP peptide
MDDLGANDELISFKDEGEQEEKSSENSSAERDLADVKSSLVNESETGSGSGSRLNFGDDIPSALRIAKKKRWNSIEERRIHQESELHSYLSRLIAAERERELEECQRNHEGDEDDSHVRAQQACIEAKHDKYMADMDELFSQVDEKRKKRDIPDYLCGKISFELMREPCITPSGITYDRKDIEEHLQRVGHFDPVTRSPLTQEQLIPNLAMKEVIDAFISENGWVEDYGSGS

SEQ ID NO: 941 - protein, 234 aa, synthetic construct
  source 1..234: note = TCF4-(GS)4-CHIP peptide
MDDLGANDELISFKDEGEQEEKSSENSSAERDLADVKSSLVNESETGSGSGSGSRLNFGDDIPSALRIAKKKRWNSIEERRIHQESELHSYLSRLIAAERERELEECQRNHEGDEDDSHVRAQQACIEAKHDKYMADMDELFSQVDEKRKKRDIPDYLCGKISFELMREPCITPSGITYDRKDIEEHLQRVGHFDPVTRSPLTQEQLIPNLAMKEVIDAFISENGWVEDYGSGS

SEQ ID NO: 942 - protein, 236 aa, synthetic construct
  source 1..236: note = TCF4-(GS)5-CHIP peptide
MDDLGANDELISFKDEGEQEEKSSENSSAERDLADVKSSLVNESETGSGSGSGSGSRLNFGDDIPSALRIAKKKRWNSIEERRIHQESELHSYLSRLIAAERERELEECQRNHEGDEDDSHVRAQQACIEAKHDKYMADMDELFSQVDEKRKKRDIPDYLCGKISFELMREPCITPSGITYDRKDIEEHLQRVGHFDPVTRSPLTQEQLIPNLAMKEVIDAFISENGWVEDYGSGS

SEQ ID NO: 943 - protein, 238 aa, synthetic construct
  source 1..238: note = TCF4-(GS)6-CHIP peptide
MDDLGANDELISFKDEGEQEEKSSENSSAERDLADVKSSLVNESETGSGSGSGSGSGSRLNFGDDIPSALRIAKKKRWNSIEERRIHQESELHSYLSRLIAAERERELEECQRNHEGDEDDSHVRAQQACIEAKHDKYMADMDELFSQVDEKRKKRDIPDYLCGKISFELMREPCITPSGITYDRKDIEEHLQRVGHFDPVTRSPLTQEQLIPNLAMKEVIDAFISENGWVEDYGSGS

SEQ ID NO: 944 - protein, 237 aa, synthetic construct
  source 1..237: note = TCF4-(GS)1-CHIP-HA peptide
MDDLGANDELISFKDEGEQEEKSSENSSAERDLADVKSSLVNESETGSRLNFGDDIPSALRIAKKKRWNSIEERRIHQESELHSYLSRLIAAERERELEECQRNHEGDEDDSHVRAQQACIEAKHDKYMADMDELFSQVDEKRKKRDIPDYLCGKISFELMREPCITPSGITYDRKDIEEHLQRVGHFDPVTRSPLTQEQLIPNLAMKEVIDAFISENGWVEDYGSGSYPYDVPDYA

SEQ ID NO: 945 - protein, 239 aa, synthetic construct
  source 1..239: note = TCF4-(GS)2-CHIP-HA peptide
MDDLGANDELISFKDEGEQEEKSSENSSAERDLADVKSSLVNESETGSGSRLNFGDDIPSALRIAKKKRWNSIEERRIHQESELHSYLSRLIAAERERELEECQRNHEGDEDDSHVRAQQACIEAKHDKYMADMDELFSQVDEKRKKRDIPDYLCGKISFELMREPCITPSGITYDRKDIEEHLQRVGHFDPVTRSPLTQEQLIPNLAMKEVIDAFISENGWVEDYGSGSYPYDVPDYA

SEQ ID NO: 946 - protein, 241 aa, synthetic construct
  source 1..241: note = TCF4-(GS)3-CHIP-HA peptide
MDDLGANDELISFKDEGEQEEKSSENSSAERDLADVKSSLVNESETGSGSGSRLNFGDDIPSALRIAKKKRWNSIEERRIHQESELHSYLSRLIAAERERELEECQRNHEGDEDDSHVRAQQACIEAKHDKYMADMDELFSQVDEKRKKRDIPDYLCGKISFELMREPCITPSGITYDRKDIEEHLQRVGHFDPVTRSPLTQEQLIPNLAMKEVIDAFISENGWVEDYGSGSYPYDVPDYA

SEQ ID NO: 947 - protein, 243 aa, synthetic construct
  source 1..243: note = TCF4-(GS)4-CHIP-HA peptide
MDDLGANDELISFKDEGEQEEKSSENSSAERDLADVKSSLVNESETGSGSGSGSRLNFGDDIPSALRIAKKKRWNSIEERRIHQESELHSYLSRLIAAERERELEECQRNHEGDEDDSHVRAQQACIEAKHDKYMADMDELFSQVDEKRKKRDIPDYLCGKISFELMREPCITPSGITYDRKDIEEHLQRVGHFDPVTRSPLTQEQLIPNLAMKEVIDAFISENGWVEDYGSGSYPYDVPDYA

SEQ ID NO: 948 - protein, 245 aa, synthetic construct
  source 1..245: note = TCF4-(GS)5-CHIP-HA peptide
MDDLGANDELISFKDEGEQEEKSSENSSAERDLADVKSSLVNESETGSGSGSGSGSRLNFGDDIPSALRIAKKKRWNSIEERRIHQESELHSYLSRLIAAERERELEECQRNHEGDEDDSHVRAQQACIEAKHDKYMADMDELFSQVDEKRKKRDIPDYLCGKISFELMREPCITPSGITYDRKDIEEHLQRVGHFDPVTRSPLTQEQLIPNLAMKEVIDAFISENGWVEDYGSGSYPYDVPDYA

SEQ ID NO: 949 - protein, 247 aa, synthetic construct
  source 1..247: note = TCF4-(GS)6-CHIP-HA peptide
MDDLGANDELISFKDEGEQEEKSSENSSAERDLADVKSSLVNESETGSGSGSGSGSGSRLNFGDDIPSALRIAKKKRWNSIEERRIHQESELHSYLSRLIAAERERELEECQRNHEGDEDDSHVRAQQACIEAKHDKYMADMDELFSQVDEKRKKRDIPDYLCGKISFELMREPCITPSGITYDRKDIEEHLQRVGHFDPVTRSPLTQEQLIPNLAMKEVIDAFISENGWVEDYGSGSYPYDVPDYA

SEQ ID NO: 950 - protein, 82 aa, synthetic construct
  source 1..82: note = DCAF1-(GS)1-TCF4 peptide
QAPINFTSRLNRRASFPKYGGVDGGCFDRHLIFSRGSDDLGANDELISFKDEGEQEEKSSENSSAERDLADVKSSLVNESET

SEQ ID NO: 951 - protein, 84 aa, synthetic construct
  source 1..84: note = DCAF1-(GS)2-TCF4 peptide
QAPINFTSRLNRRASFPKYGGVDGGCFDRHLIFSRGSGSDDLGANDELISFKDEGEQEEKSSENSSAERDLADVKSSLVNESET

SEQ ID NO: 952 - protein, 86 aa, synthetic construct
  source 1..86: note = DCAF1-(GS)3-TCF4 peptide
QAPINFTSRLNRRASFPKYGGVDGGCFDRHLIFSRGSGSGSDDLGANDELISFKDEGEQEEKSSENSSAERDLADVKSSLVNESET

SEQ ID NO: 953 - protein, 88 aa, synthetic construct
  source 1..88: note = DCAF1-(GS)4-TCF4 peptide
QAPINFTSRLNRRASFPKYGGVDGGCFDRHLIFSRGSGSGSGSDDLGANDELISFKDEGEQEEKSSENSSAERDLADVKSSLVNESET

SEQ ID NO: 954 - protein, 90 aa, synthetic construct
  source 1..90: note = DCAF1-(GS)5-TCF4 peptide
QAPINFTSRLNRRASFPKYGGVDGGCFDRHLIFSRGSGSGSGSGSDDLGANDELISFKDEGEQEEKSSENSSAERDLADVKSSLVNESET

SEQ ID NO: 955 - protein, 92 aa, synthetic construct
  source 1..92: note = DCAF1-(GS)6-TCF4 peptide
QAPINFTSRLNRRASFPKYGGVDGGCFDRHLIFSRGSGSGSGSGSGSDDLGANDELISFKDEGEQEEKSSENSSAERDLADVKSSLVNESET

SEQ ID NO: 956 - protein, 98 aa, synthetic construct
  source 1..98: note = HA-DCAF1-(GS)1-TCF4 peptide
MYPYDVPDYAGSGSGSQAPINFTSRLNRRASFPKYGGVDGGCFDRHLIFSRGSDDLGANDELISFKDEGEQEEKSSENSSAERDLADVKSSLVNESET

SEQ ID NO: 957 - protein, 100 aa, synthetic construct
  source 1..100: note = HA-DCAF1-(GS)2-TCF4 peptide
MYPYDVPDYAGSGSGSQAPINFTSRLNRRASFPKYGGVDGGCFDRHLIFSRGSGSDDLGANDELISFKDEGEQEEKSSENSSAERDLADVKSSLVNESET

SEQ ID NO: 958 - protein, 102 aa, synthetic construct
  source 1..102: note = HA-DCAF1-(GS)3-TCF4 peptide
MYPYDVPDYAGSGSGSQAPINFTSRLNRRASFPKYGGVDGGCFDRHLIFSRGSGSGSDDLGANDELISFKDEGEQEEKSSENSSAERDLADVKSSLVNESET

SEQ ID NO: 959 - protein, 104 aa, synthetic construct
  source 1..104: note = HA-DCAF1-(GS)4-TCF4 peptide
MYPYDVPDYAGSGSGSQAPINFTSRLNRRASFPKYGGVDGGCFDRHLIFSRGSGSGSGSDDLGANDELISFKDEGEQEEKSSENSSAERDLADVKSSLVNESET

SEQ ID NO: 960 - protein, 106 aa, synthetic construct
  source 1..106: note = HA-DCAF1-(GS)5-TCF4 peptide
MYPYDVPDYAGSGSGSQAPINFTSRLNRRASFPKYGGVDGGCFDRHLIFSRGSGSGSGSGSDDLGANDELISFKDEGEQEEKSSENSSAERDLADVKSSLVNESET

SEQ ID NO: 961 - protein, 108 aa, synthetic construct
  source 1..108: note = HA-DCAF1-(GS)6-TCF4 peptide
MYPYDVPDYAGSGSGSQAPINFTSRLNRRASFPKYGGVDGGCFDRHLIFSRGSGSGSGSGSGSDDLGANDELISFKDEGEQEEKSSENSSAERDLADVKSSLVNESET

SEQ ID NO: 962 - protein, 403 aa, synthetic construct
  source 1..403: note = TCF4-(GS)1-E6AP peptide
DDLGANDELISFKDEGEQEEKSSENSSAERDLADVKSSLVNESETGSNPYLRLKVRRDHIIDDALVRLEMIAMENPADLKKQLYVEFEGEQGVDEGGVSKEFFQLVVEEIFNPDIGMFTYDESTKLFWFNPSSFETEGQFTLIGIVLGLAIYNNCILDVHFPMVVYRKLMGKKGTFRDLGDSHPVLYQSLKDLLEYEGNVEDDMMITFQISQTDLFGNPMMYDLKENGDKIPITNENRKEFVNLYSDYILNKSVEKQFKAFRRGFHMVTNESPLKYLFRPEEIELLICGSRNLDFQALEETTEYDGGYTRDSVLIREFWEIVHSFTDEQKRLFLQFTTGTDRAPVGGLGKLKMIIAKNGPDTERLPTSHTCFNVLLLPEYSSKEKLKERLLKAITYAKGFGML

SEQ ID NO: 963 - protein, 405 aa, synthetic construct
  source 1..405: note = TCF4-(GS)2-E6AP peptide
DDLGANDELISFKDEGEQEEKSSENSSAERDLADVKSSLVNESETGSGSNPYLRLKVRRDHIIDDALVRLEMIAMENPADLKKQLYVEFEGEQGVDEGGVSKEFFQLVVEEIFNPDIGMFTYDESTKLFWFNPSSFETEGQFTLIGIVLGLAIYNNCILDVHFPMVVYRKLMGKKGTFRDLGDSHPVLYQSLKDLLEYEGNVEDDMMITFQISQTDLFGNPMMYDLKENGDKIPITNENRKEFVNLYSDYILNKSVEKQFKAFRRGFHMVTNESPLKYLFRPEEIELLICGSRNLDFQALEETTEYDGGYTRDSVLIREFWEIVHSFTDEQKRLFLQFTTGTDRAPVGGLGKLKMIIAKNGPDTERLPTSHTCFNVLLLPEYSSKEKLKERLLKAITYAKGFGML

SEQ ID NO: 964 - protein, 407 aa, synthetic construct
  source 1..407: note = TCF4-(GS)3-E6AP peptide
DDLGANDELISFKDEGEQEEKSSENSSAERDLADVKSSLVNESETGSGSGSNPYLRLKVRRDHIIDDALVRLEMIAMENPADLKKQLYVEFEGEQGVDEGGVSKEFFQLVVEEIFNPDIGMFTYDESTKLFWFNPSSFETEGQFTLIGIVLGLAIYNNCILDVHFPMVVYRKLMGKKGTFRDLGDSHPVLYQSLKDLLEYEGNVEDDMMITFQISQTDLFGNPMMYDLKENGDKIPITNENRKEFVNLYSDYILNKSVEKQFKAFRRGFHMVTNESPLKYLFRPEEIELLICGSRNLDFQALEETTEYDGGYTRDSVLIREFWEIVHSFTDEQKRLFLQFTTGTDRAPVGGLGKLKMIIAKNGPDTERLPTSHTCFNVLLLPEYSSKEKLKERLLKAITYAKGFGML

SEQ ID NO: 965 - protein, 409 aa, synthetic construct
  source 1..409: note = TCF4-(GS)4-E6AP peptide
DDLGANDELISFKDEGEQEEKSSENSSAERDLADVKSSLVNESETGSGSGSGSNPYLRLKVRRDHIIDDALVRLEMIAMENPADLKKQLYVEFEGEQGVDEGGVSKEFFQLVVEEIFNPDIGMFTYDESTKLFWFNPSSFETEGQFTLIGIVLGLAIYNNCILDVHFPMVVYRKLMGKKGTFRDLGDSHPVLYQSLKDLLEYEGNVEDDMMITFQISQTDLFGNPMMYDLKENGDKIPITNENRKEFVNLYSDYILNKSVEKQFKAFRRGFHMVTNESPLKYLFRPEEIELLICGSRNLDFQALEETTEYDGGYTRDSVLIREFWEIVHSFTDEQKRLFLQFTTGTDRAPVGGLGKLKMIIAKNGPDTERLPTSHTCFNVLLLPEYSSKEKLKERLLKAITYAKGFGML

SEQ ID NO: 966 - protein, 411 aa, synthetic construct
  source 1..411: note = TCF4-(GS)5-E6AP peptide
DDLGANDELISFKDEGEQEEKSSENSSAERDLADVKSSLVNESETGSGSGSGSGSNPYLRLKVRRDHIIDDALVRLEMIAMENPADLKKQLYVEFEGEQGVDEGGVSKEFFQLVVEEIFNPDIGMFTYDESTKLFWFNPSSFETEGQFTLIGIVLGLAIYNNCILDVHFPMVVYRKLMGKKGTFRDLGDSHPVLYQSLKDLLEYEGNVEDDMMITFQISQTDLFGNPMMYDLKENGDKIPITNENRKEFVNLYSDYILNKSVEKQFKAFRRGFHMVTNESPLKYLFRPEEIELLICGSRNLDFQALEETTEYDGGYTRDSVLIREFWEIVHSFTDEQKRLFLQFTTGTDRAPVGGLGKLKMIIAKNGPDTERLPTSHTCFNVLLLPEYSSKEKLKERLLKAITYAKGFGML

SEQ ID NO: 967 - protein, 413 aa, synthetic construct
  source 1..413: note = TCF4-(GS)6-E6AP peptide
DDLGANDELISFKDEGEQEEKSSENSSAERDLADVKSSLVNESETGSGSGSGSGSGSNPYLRLKVRRDHIIDDALVRLEMIAMENPADLKKQLYVEFEGEQGVDEGGVSKEFFQLVVEEIFNPDIGMFTYDESTKLFWFNPSSFETEGQFTLIGIVLGLAIYNNCILDVHFPMVVYRKLMGKKGTFRDLGDSHPVLYQSLKDLLEYEGNVEDDMMITFQISQTDLFGNPMMYDLKENGDKIPITNENRKEFVNLYSDYILNKSVEKQFKAFRRGFHMVTNESPLKYLFRPEEIELLICGSRNLDFQALEETTEYDGGYTRDSVLIREFWEIVHSFTDEQKRLFLQFTTGTDRAPVGGLGKLKMIIAKNGPDTERLPTSHTCFNVLLLPEYSSKEKLKERLLKAITYAKGFGML

SEQ ID NO: 968 - protein, 419 aa, synthetic construct
  source 1..419: note = HA-TCF4-(GS)1-E6AP peptide
MYPYDVPDYAGSGSGSDDLGANDELISFKDEGEQEEKSSENSSAERDLADVKSSLVNESETGSNPYLRLKVRRDHIIDDALVRLEMIAMENPADLKKQLYVEFEGEQGVDEGGVSKEFFQLVVEEIFNPDIGMFTYDESTKLFWFNPSSFETEGQFTLIGIVLGLAIYNNCILDVHFPMVVYRKLMGKKGTFRDLGDSHPVLYQSLKDLLEYEGNVEDDMMITFQISQTDLFGNPMMYDLKENGDKIPITNENRKEFVNLYSDYILNKSVEKQFKAFRRGFHMVTNESPLKYLFRPEEIELLICGSRNLDFQALEETTEYDGGYTRDSVLIREFWEIVHSFTDEQKRLFLQFTTGTDRAPVGGLGKLKMIIAKNGPDTERLPTSHTCFNVLLLPEYSSKEKLKERLLKAITYAKGFGML

SEQ ID NO: 969 - protein, 421 aa, synthetic construct
  source 1..421: note = HA-TCF4-(GS)2-E6AP peptide
MYPYDVPDYAGSGSGSDDLGANDELISFKDEGEQEEKSSENSSAERDLADVKSSLVNESETGSGSNPYLRLKVRRDHIIDDALVRLEMIAMENPADLKKQLYVEFEGEQGVDEGGVSKEFFQLVVEEIFNPDIGMFTYDESTKLFWFNPSSFETEGQFTLIGIVLGLAIYNNCILDVHFPMVVYRKLMGKKGTFRDLGDSHPVLYQSLKDLLEYEGNVEDDMMITFQISQTDLFGNPMMYDLKENGDKIPITNENRKEFVNLYSDYILNKSVEKQFKAFRRGFHMVTNESPLKYLFRPEEIELLICGSRNLDFQALEETTEYDGGYTRDSVLIREFWEIVHSFTDEQKRLFLQFTTGTDRAPVGGLGKLKMIIAKNGPDTERLPTSHTCFNVLLLPEYSSKEKLKERLLKAITYAKGFGML

SEQ ID NO: 970 - protein, 423 aa, synthetic construct
  source 1..423: note = HA-TCF4-(GS)3-E6AP peptide
MYPYDVPDYAGSGSGSDDLGANDELISFKDEGEQEEKSSENSSAERDLADVKSSLVNESETGSGSGSNPYLRLKVRRDHIIDDALVRLEMIAMENPADLKKQLYVEFEGEQGVDEGGVSKEFFQLVVEEIFNPDIGMFTYDESTKLFWFNPSSFETEGQFTLIGIVLGLAIYNNCILDVHFPMVVYRKLMGKKGTFRDLGDSHPVLYQSLKDLLEYEGNVEDDMMITFQISQTDLFGNPMMYDLKENGDKIPITNENRKEFVNLYSDYILNKSVEKQFKAFRRGFHMVTNESPLKYLFRPEEIELLICGSRNLDFQALEETTEYDGGYTRDSVLIREFWEIVHSFTDEQKRLFLQFTTGTDRAPVGGLGKLKMIIAKNGPDTERLPTSHTCFNVLLLPEYSSKEKLKERLLKAITYAKGFGML

SEQ ID NO: 971 - protein, 425 aa, synthetic construct
  source 1..425: note = HA-TCF4-(GS)4-E6AP peptide
MYPYDVPDYAGSGSGSDDLGANDELISFKDEGEQEEKSSENSSAERDLADVKSSLVNESETGSGSGSGSNPYLRLKVRRDHIIDDALVRLEMIAMENPADLKKQLYVEFEGEQGVDEGGVSKEFFQLVVEEIFNPDIGMFTYDESTKLFWFNPSSFETEGQFTLIGIVLGLAIYNNCILDVHFPMVVYRKLMGKKGTFRDLGDSHPVLYQSLKDLLEYEGNVEDDMMITFQISQTDLFGNPMMYDLKENGDKIPITNENRKEFVNLYSDYILNKSVEKQFKAFRRGFHMVTNESPLKYLFRPEEIELLICGSRNLDFQALEETTEYDGGYTRDSVLIREFWEIVHSFTDEQKRLFLQFTTGTDRAPVGGLGKLKMIIAKNGPDTERLPTSHTCFNVLLLPEYSSKEKLKERLLKAITYAKGFGML

SEQ ID NO: 972 - protein, 427 aa, synthetic construct
  source 1..427: note = HA-TCF4-(GS)5-E6AP peptide
MYPYDVPDYAGSGSGSDDLGANDELISFKDEGEQEEKSSENSSAERDLADVKSSLVNESETGSGSGSGSGSNPYLRLKVRRDHIIDDALVRLEMIAMENPADLKKQLYVEFEGEQGVDEGGVSKEFFQLVVEEIFNPDIGMFTYDESTKLFWFNPSSFETEGQFTLIGIVLGLAIYNNCILDVHFPMVVYRKLMGKKGTFRDLGDSHPVLYQSLKDLLEYEGNVEDDMMITFQISQTDLFGNPMMYDLKENGDKIPITNENRKEFVNLYSDYILNKSVEKQFKAFRRGFHMVTNESPLKYLFRPEEIELLICGSRNLDFQALEETTEYDGGYTRDSVLIREFWEIVHSFTDEQKRLFLQFTTGTDRAPVGGLGKLKMIIAKNGPDTERLPTSHTCFNVLLLPEYSSKEKLKERLLKAITYAKGFGML

SEQ ID NO: 973 - protein, 429 aa, synthetic construct
  source 1..429: note = HA-TCF4-(GS)6-E6AP peptide
MYPYDVPDYAGSGSGSDDLGANDELISFKDEGEQEEKSSENSSAERDLADVKSSLVNESETGSGSGSGSGSGSNPYLRLKVRRDHIIDDALVRLEMIAMENPADLKKQLYVEFEGEQGVDEGGVSKEFFQLVVEEIFNPDIGMFTYDESTKLFWFNPSSFETEGQFTLIGIVLGLAIYNNCILDVHFPMVVYRKLMGKKGTFRDLGDSHPVLYQSLKDLLEYEGNVEDDMMITFQISQTDLFGNPMMYDLKENGDKIPITNENRKEFVNLYSDYILNKSVEKQFKAFRRGFHMVTNESPLKYLFRPEEIELLICGSRNLDFQALEETTEYDGGYTRDSVLIREFWEIVHSFTDEQKRLFLQFTTGTDRAPVGGLGKLKMIIAKNGPDTERLPTSHTCFNVLLLPEYSSKEKLKERLLKAITYAKGFGML

SEQ ID NO: 974 - protein, 333 aa, synthetic construct
  source 1..333: note = bTRCP-(GS)1-TCF4 peptide
DPAEAVLQEKALKFMCSMPRSLWLGCSSLADSMPSLRCLYNPGTGALTAFQNSSEREDCNNGEPPRKIIPEKNSLRQTYNSCARLCLNQETVCLASTAMKTENCVAKTKLANGTSSMIVPKQRKLSASYEKEKELCVKYFEQWSESDQVEFVEHLISQMCHYQHGHINSYLKPMLQRDFITALPARGLDHIAENILSYLDAKSLCAAELVCKEWYRVTSDGMLWKKLIERMVRTDSLWRGLAERRGWGQYLFKNKPPDGNAPPNSFYRALYPKIIQDIETIESNSRGSDDLGANDELISFKDEGEQEEKSSENSSAERDLADVKSSLVNESET

SEQ ID NO: 975 - protein, 335 aa, synthetic construct
  source 1..335: note = bTRCP-(GS)2-TCF4 peptide
DPAEAVLQEKALKFMCSMPRSLWLGCSSLADSMPSLRCLYNPGTGALTAFQNSSEREDCNNGEPPRKIIPEKNSLRQTYNSCARLCLNQETVCLASTAMKTENCVAKTKLANGTSSMIVPKQRKLSASYEKEKELCVKYFEQWSESDQVEFVEHLISQMCHYQHGHINSYLKPMLQRDFITALPARGLDHIAENILSYLDAKSLCAAELVCKEWYRVTSDGMLWKKLIERMVRTDSLWRGLAERRGWGQYLFKNKPPDGNAPPNSFYRALYPKIIQDIETIESNSRGSGSDDLGANDELISFKDEGEQEEKSSENSSAERDLADVKSSLVNESET

SEQ ID NO: 976 - protein, 337 aa, synthetic construct
  source 1..337: note = bTRCP-(GS)3-TCF4 peptide
DPAEAVLQEKALKFMCSMPRSLWLGCSSLADSMPSLRCLYNPGTGALTAFQNSSEREDCNNGEPPRKIIPEKNSLRQTYNSCARLCLNQETVCLASTAMKTENCVAKTKLANGTSSMIVPKQRKLSASYEKEKELCVKYFEQWSESDQVEFVEHLISQMCHYQHGHINSYLKPMLQRDFITALPARGLDHIAENILSYLDAKSLCAAELVCKEWYRVTSDGMLWKKLIERMVRTDSLWRGLAERRGWGQYLFKNKPPDGNAPPNSFYRALYPKIIQDIETIESNSRGSGSGSDDLGANDELISFKDEGEQEEKSSENSSAERDLADVKSSLVNESET

SEQ ID NO: 977 - protein, 339 aa, synthetic construct
  source 1..339: note = bTRCP-(GS)4-TCF4 peptide
DPAEAVLQEKALKFMCSMPRSLWLGCSSLADSMPSLRCLYNPGTGALTAFQNSSEREDCNNGEPPRKIIPEKNSLRQTYNSCARLCLNQETVCLASTAMKTENCVAKTKLANGTSSMIVPKQRKLSASYEKEKELCVKYFEQWSESDQVEFVEHLISQMCHYQHGHINSYLKPMLQRDFITALPARGLDHIAENILSYLDAKSLCAAELVCKEWYRVTSDGMLWKKLIERMVRTDSLWRGLAERRGWGQYLFKNKPPDGNAPPNSFYRALYPKIIQDIETIESNSRGSGSGSGSDDLGANDELISFKDEGEQEEKSSENSSAERDLADVKSSLVNESET

SEQ ID NO: 978 - protein, 341 aa, synthetic construct
  source 1..341: note = bTRCP-(GS)5-TCF4 peptide
DPAEAVLQEKALKFMCSMPRSLWLGCSSLADSMPSLRCLYNPGTGALTAFQNSSEREDCNNGEPPRKIIPEKNSLRQTYNSCARLCLNQETVCLASTAMKTENCVAKTKLANGTSSMIVPKQRKLSASYEKEKELCVKYFEQWSESDQVEFVEHLISQMCHYQHGHINSYLKPMLQRDFITALPARGLDHIAENILSYLDAKSLCAAELVCKEWYRVTSDGMLWKKLIERMVRTDSLWRGLAERRGWGQYLFKNKPPDGNAPPNSFYRALYPKIIQDIETIESNSRGSGSGSGSGSDDLGANDELISFKDEGEQEEKSSENSSAERDLADVKSSLVNESET

SEQ ID NO: 979 - protein, 343 aa, synthetic construct
  source 1..343: note = bTRCP-(GS)6-TCF4 peptide
DPAEAVLQEKALKFMCSMPRSLWLGCSSLADSMPSLRCLYNPGTGALTAFQNSSEREDCNNGEPPRKIIPEKNSLRQTYNSCARLCLNQETVCLASTAMKTENCVAKTKLANGTSSMIVPKQRKLSASYEKEKELCVKYFEQWSESDQVEFVEHLISQMCHYQHGHINSYLKPMLQRDFITALPARGLDHIAENILSYLDAKSLCAAELVCKEWYRVTSDGMLWKKLIERMVRTDSLWRGLAERRGWGQYLFKNKPPDGNAPPNSFYRALYPKIIQDIETIESNSRGSGSGSGSGSGSDDLGANDELISFKDEGEQEEKSSENSSAERDLADVKSSLVNESET

SEQ ID NO: 980 - protein, 343 aa, synthetic construct
  source 1..343: note = HA-bTRCP-(GS)1-TCF4 peptide
MYPYDVPDYADPAEAVLQEKALKFMCSMPRSLWLGCSSLADSMPSLRCLYNPGTGALTAFQNSSEREDCNNGEPPRKIIPEKNSLRQTYNSCARLCLNQETVCLASTAMKTENCVAKTKLANGTSSMIVPKQRKLSASYEKEKELCVKYFEQWSESDQVEFVEHLISQMCHYQHGHINSYLKPMLQRDFITALPARGLDHIAENILSYLDAKSLCAAELVCKEWYRVTSDGMLWKKLIERMVRTDSLWRGLAERRGWGQYLFKNKPPDGNAPPNSFYRALYPKIIQDIETIESNSRGSDDLGANDELISFKDEGEQEEKSSENSSAERDLADVKSSLVNESET

SEQ ID NO: 981 - protein, 345 aa, synthetic construct
  source 1..345: note = HA-bTRCP-(GS)2-TCF4 peptide
MYPYDVPDYADPAEAVLQEKALKFMCSMPRSLWLGCSSLADSMPSLRCLYNPGTGALTAFQNSSEREDCNNGEPPRKIIPEKNSLRQTYNSCARLCLNQETVCLASTAMKTENCVAKTKLANGTSSMIVPKQRKLSASYEKEKELCVKYFEQWSESDQVEFVEHLISQMCHYQHGHINSYLKPMLQRDFITALPARGLDHIAENILSYLDAKSLCAAELVCKEWYRVTSDGMLWKKLIERMVRTDSLWRGLAERRGWGQYLFKNKPPDGNAPPNSFYRALYPKIIQDIETIESNSRGSGSDDLGANDELISFKDEGEQEEKSSENSSAERDLADVKSSLVNESET

SEQ ID NO: 982 - protein, 347 aa, synthetic construct
  source 1..347: note = HA-bTRCP-(GS)3-TCF4 peptide
MYPYDVPDYADPAEAVLQEKALKFMCSMPRSLWLGCSSLADSMPSLRCLYNPGTGALTAFQNSSEREDCNNGEPPRKIIPEKNSLRQTYNSCARLCLNQETVCLASTAMKTENCVAKTKLANGTSSMIVPKQRKLSASYEKEKELCVKYFEQWSESDQVEFVEHLISQMCHYQHGHINSYLKPMLQRDFITALPARGLDHIAENILSYLDAKSLCAAELVCKEWYRVTSDGMLWKKLIERMVRTDSLWRGLAERRGWGQYLFKNKPPDGNAPPNSFYRALYPKIIQDIETIESNSRGSGSGSDDLGANDELISFKDEGEQEEKSSENSSAERDLADVKSSLVNESET

SEQ ID NO: 983 - protein, 349 aa, synthetic construct
  source 1..349: note = HA-bTRCP-(GS)4-TCF4 peptide
MYPYDVPDYADPAEAVLQEKALKFMCSMPRSLWLGCSSLADSMPSLRCLYNPGTGALTAFQNSSEREDCNNGEPPRKIIPEKNSLRQTYNSCARLCLNQETVCLASTAMKTENCVAKTKLANGTSSMIVPKQRKLSASYEKEKELCVKYFEQWSESDQVEFVEHLISQMCHYQHGHINSYLKPMLQRDFITALPARGLDHIAENILSYLDAKSLCAAELVCKEWYRVTSDGMLWKKLIERMVRTDSLWRGLAERRGWGQYLFKNKPPDGNAPPNSFYRALYPKIIQDIETIESNSRGSGSGSGSDDLGANDELISFKDEGEQEEKSSENSSAERDLADVKSSLVNESET

SEQ ID NO: 984 - protein, 351 aa, synthetic construct
  source 1..351: note = HA-bTRCP-(GS)5-TCF4 peptide
MYPYDVPDYADPAEAVLQEKALKFMCSMPRSLWLGCSSLADSMPSLRCLYNPGTGALTAFQNSSEREDCNNGEPPRKIIPEKNSLRQTYNSCARLCLNQETVCLASTAMKTENCVAKTKLANGTSSMIVPKQRKLSASYEKEKELCVKYFEQWSESDQVEFVEHLISQMCHYQHGHINSYLKPMLQRDFITALPARGLDHIAENILSYLDAKSLCAAELVCKEWYRVTSDGMLWKKLIERMVRTDSLWRGLAERRGWGQYLFKNKPPDGNAPPNSFYRALYPKIIQDIETIESNSRGSGSGSGSGSDDLGANDELISFKDEGEQEEKSSENSSAERDLADVKSSLVNESET

SEQ ID NO: 985 - protein, 353 aa, synthetic construct
  source 1..353: note = HA-bTRCP-(GS)6-TCF4 peptide
MYPYDVPDYADPAEAVLQEKALKFMCSMPRSLWLGCSSLADSMPSLRCLYNPGTGALTAFQNSSEREDCNNGEPPRKIIPEKNSLRQTYNSCARLCLNQETVCLASTAMKTENCVAKTKLANGTSSMIVPKQRKLSASYEKEKELCVKYFEQWSESDQVEFVEHLISQMCHYQHGHINSYLKPMLQRDFITALPARGLDHIAENILSYLDAKSLCAAELVCKEWYRVTSDGMLWKKLIERMVRTDSLWRGLAERRGWGQYLFKNKPPDGNAPPNSFYRALYPKIIQDIETIESNSRGSGSGSGSGSGSDDLGANDELISFKDEGEQEEKSSENSSAERDLADVKSSLVNESET

SEQ ID NO: 986 - protein, 368 aa, synthetic construct
  source 1..368: note = Keap1-(GS)1-TCF4 peptide
QPDPRPSGAGACCRFLPLQSQCPEGAGDAVMYASTECKAEVTPSQHGNRTFSYTLEDHTKQAFGIMNELRLSQQLCDVTLQVKYQDAPAAQFMAHKVVLASSSPVFKAMFTNGLREQGMEVVSIEGIHPKVMERLIEFAYTASISMGEKCVLHVMNGAVMYQIDSVVRACSDFLVQQLDPSNAIGIANFAEQIGCVELHQRAREYIYMHFGEVAKQEEFFNLSHCQLVTLISRDDLNVRCESEVFHACINWVKYDCEQRRFYVQALLRAVRCHSLTPNFLQMQLQKCEILQSDSRCKDYLVKIFEELTLHKPTQVMPCRAPGSDDLGANDELISFKDEGEQEEKSSENSSAERDLADVKSSLVNESET

SEQ ID NO: 987 - protein, 370 aa, synthetic construct
  source 1..370: note = Keap1-(GS)2-TCF4 peptide
QPDPRPSGAGACCRFLPLQSQCPEGAGDAVMYASTECKAEVTPSQHGNRTFSYTLEDHTKQAFGIMNELRLSQQLCDVTLQVKYQDAPAAQFMAHKVVLASSSPVFKAMFTNGLREQGMEVVSIEGIHPKVMERLIEFAYTASISMGEKCVLHVMNGAVMYQIDSVVRACSDFLVQQLDPSNAIGIANFAEQIGCVELHQRAREYIYMHFGEVAKQEEFFNLSHCQLVTLISRDDLNVRCESEVFHACINWVKYDCEQRRFYVQALLRAVRCHSLTPNFLQMQLQKCEILQSDSRCKDYLVKIFEELTLHKPTQVMPCRAPGSGSDDLGANDELISFKDEGEQEEKSSENSSAERDLADVKSSLVNESET

SEQ ID NO: 988 - protein, 372 aa, synthetic construct
  source 1..372: note = Keap1-(GS)3-TCF4 peptide
QPDPRPSGAGACCRFLPLQSQCPEGAGDAVMYASTECKAEVTPSQHGNRTFSYTLEDHTKQAFGIMNELRLSQQLCDVTLQVKYQDAPAAQFMAHKVVLASSSPVFKAMFTNGLREQGMEVVSIEGIHPKVMERLIEFAYTASISMGEKCVLHVMNGAVMYQIDSVVRACSDFLVQQLDPSNAIGIANFAEQIGCVELHQRAREYIYMHFGEVAKQEEFFNLSHCQLVTLISRDDLNVRCESEVFHACINWVKYDCEQRRFYVQALLRAVRCHSLTPNFLQMQLQKCEILQSDSRCKDYLVKIFEELTLHKPTQVMPCRAPGSGSGSDDLGANDELISFKDEGEQEEKSSENSSAERDLADVKSSLVNESET

SEQ ID NO: 989 - protein, 374 aa, synthetic construct
  source 1..374: note = Keap1-(GS)4-TCF4 peptide
QPDPRPSGAGACCRFLPLQSQCPEGAGDAVMYASTECKAEVTPSQHGNRTFSYTLEDHTKQAFGIMNELRLSQQLCDVTLQVKYQDAPAAQFMAHKVVLASSSPVFKAMFTNGLREQGMEVVSIEGIHPKVMERLIEFAYTASISMGEKCVLHVMNGAVMYQIDSVVRACSDFLVQQLDPSNAIGIANFAEQIGCVELHQRAREYIYMHFGEVAKQEEFFNLSHCQLVTLISRDDLNVRCESEVFHACINWVKYDCEQRRFYVQALLRAVRCHSLTPNFLQMQLQKCEILQSDSRCKDYLVKIFEELTLHKPTQVMPCRAPGSGSGSGSDDLGANDELISFKDEGEQEEKSSENSSAERDLADVKSSLVNESET

SEQ ID NO: 990 - protein, 376 aa, synthetic construct
  source 1..376: note = Keap1-(GS)5-TCF4 peptide
QPDPRPSGAGACCRFLPLQSQCPEGAGDAVMYASTECKAEVTPSQHGNRTFSYTLEDHTKQAFGIMNELRLSQQLCDVTLQVKYQDAPAAQFMAHKVVLASSSPVFKAMFTNGLREQGMEVVSIEGIHPKVMERLIEFAYTASISMGEKCVLHVMNGAVMYQIDSVVRACSDFLVQQLDPSNAIGIANFAEQIGCVELHQRAREYIYMHFGEVAKQEEFFNLSHCQLVTLISRDDLNVRCESEVFHACINWVKYDCEQRRFYVQALLRAVRCHSLTPNFLQMQLQKCEILQSDSRCKDYLVKIFEELTLHKPTQVMPCRAPGSGSGSGSGSDDLGANDELISFKDEGEQEEKSSENSSAERDLADVKSSLVNESET

SEQ ID NO: 991 - protein, 378 aa, synthetic construct
  source 1..378: note = Keap1-(GS)6-TCF4 peptide
QPDPRPSGAGACCRFLPLQSQCPEGAGDAVMYASTECKAEVTPSQHGNRTFSYTLEDHTKQAFGIMNELRLSQQLCDVTLQVKYQDAPAAQFMAHKVVLASSSPVFKAMFTNGLREQGMEVVSIEGIHPKVMERLIEFAYTASISMGEKCVLHVMNGAVMYQIDSVVRACSDFLVQQLDPSNAIGIANFAEQIGCVELHQRAREYIYMHFGEVAKQEEFFNLSHCQLVTLISRDDLNVRCESEVFHACINWVKYDCEQRRFYVQALLRAVRCHSLTPNFLQMQLQKCEILQSDSRCKDYLVKIFEELTLHKPTQVMPCRAPGSGSGSGSGSGSDDLGANDELISFKDEGEQEEKSSENSSAERDLADVKSSLVNESET

SEQ ID NO: 992 - protein, 384 aa, synthetic construct
  source 1..384: note = HA-Keap1-(GS)1-TCF4 peptide
MYPYDVPDYAGSGSGSQPDPRPSGAGACCRFLPLQSQCPEGAGDAVMYASTECKAEVTPSQHGNRTFSYTLEDHTKQAFGIMNELRLSQQLCDVTLQVKYQDAPAAQFMAHKVVLASSSPVFKAMFTNGLREQGMEVVSIEGIHPKVMERLIEFAYTASISMGEKCVLHVMNGAVMYQIDSVVRACSDFLVQQLDPSNAIGIANFAEQIGCVELHQRAREYIYMHFGEVAKQEEFFNLSHCQLVTLISRDDLNVRCESEVFHACINWVKYDCEQRRFYVQALLRAVRCHSLTPNFLQMQLQKCEILQSDSRCKDYLVKIFEELTLHKPTQVMPCRAPGSDDLGANDELISFKDEGEQEEKSSENSSAERDLADVKSSLVNESET

SEQ ID NO: 993 - protein, 386 aa, synthetic construct
  source 1..386: note = HA-Keap1-(GS)2-TCF4 peptide
MYPYDVPDYAGSGSGSQPDPRPSGAGACCRFLPLQSQCPEGAGDAVMYASTECKAEVTPSQHGNRTFSYTLEDHTKQAFGIMNELRLSQQLCDVTLQVKYQDAPAAQFMAHKVVLASSSPVFKAMFTNGLREQGMEVVSIEGIHPKVMERLIEFAYTASISMGEKCVLHVMNGAVMYQIDSVVRACSDFLVQQLDPSNAIGIANFAEQIGCVELHQRAREYIYMHFGEVAKQEEFFNLSHCQLVTLISRDDLNVRCESEVFHACINWVKYDCEQRRFYVQALLRAVRCHSLTPNFLQMQLQKCEILQSDSRCKDYLVKIFEELTLHKPTQVMPCRAPGSGSDDLGANDELISFKDEGEQEEKSSENSSAERDLADVKSSLVNESET

SEQ ID NO: 994 - protein, 388 aa, synthetic construct
  source 1..388: note = HA-Keap1-(GS)3-TCF4 peptide
MYPYDVPDYAGSGSGSQPDPRPSGAGACCRFLPLQSQCPEGAGDAVMYASTECKAEVTPSQHGNRTFSYTLEDHTKQAFGIMNELRLSQQLCDVTLQVKYQDAPAAQFMAHKVVLASSSPVFKAMFTNGLREQGMEVVSIEGIHPKVMERLIEFAYTASISMGEKCVLHVMNGAVMYQIDSVVRACSDFLVQQLDPSNAIGIANFAEQIGCVELHQRAREYIYMHFGEVAKQEEFFNLSHCQLVTLISRDDLNVRCESEVFHACINWVKYDCEQRRFYVQALLRAVRCHSLTPNFLQMQLQKCEILQSDSRCKDYLVKIFEELTLHKPTQVMPCRAPGSGSGSDDLGANDELISFKDEGEQEEKSSENSSAERDLADVKSSLVNESET

SEQ ID NO: 995 - protein, 390 aa, synthetic construct
  source 1..390: note = HA-Keap1-(GS)4-TCF4 peptide
MYPYDVPDYAGSGSGSQPDPRPSGAGACCRFLPLQSQCPEGAGDAVMYASTECKAEVTPSQHGNRTFSYTLEDHTKQAFGIMNELRLSQQLCDVTLQVKYQDAPAAQFMAHKVVLASSSPVFKAMFTNGLREQGMEVVSIEGIHPKVMERLIEFAYTASISMGEKCVLHVMNGAVMYQIDSVVRACSDFLVQQLDPSNAIGIANFAEQIGCVELHQRAREYIYMHFGEVAKQEEFFNLSHCQLVTLISRDDLNVRCESEVFHACINWVKYDCEQRRFYVQALLRAVRCHSLTPNFLQMQLQKCEILQSDSRCKDYLVKIFEELTLHKPTQVMPCRAPGSGSGSGSDDLGANDELISFKDEGEQEEKSSENSSAERDLADVKSSLVNESET

SEQ ID NO: 996 - protein, 392 aa, synthetic construct
  source 1..392: note = HA-Keap1-(GS)5-TCF4 peptide
MYPYDVPDYAGSGSGSQPDPRPSGAGACCRFLPLQSQCPEGAGDAVMYASTECKAEVTPSQHGNRTFSYTLEDHTKQAFGIMNELRLSQQLCDVTLQVKYQDAPAAQFMAHKVVLASSSPVFKAMFTNGLREQGMEVVSIEGIHPKVMERLIEFAYTASISMGEKCVLHVMNGAVMYQIDSVVRACSDFLVQQLDPSNAIGIANFAEQIGCVELHQRAREYIYMHFGEVAKQEEFFNLSHCQLVTLISRDDLNVRCESEVFHACINWVKYDCEQRRFYVQALLRAVRCHSLTPNFLQMQLQKCEILQSDSRCKDYLVKIFEELTLHKPTQVMPCRAPGSGSGSGSGSDDLGANDELISFKDEGEQEEKSSENSSAERDLADVKSSLVNESET

SEQ ID NO: 997 - protein, 394 aa, synthetic construct
  source 1..394: note = HA-Keap1-(GS)6-TCF4 peptide
MYPYDVPDYAGSGSGSQPDPRPSGAGACCRFLPLQSQCPEGAGDAVMYASTECKAEVTPSQHGNRTFSYTLEDHTKQAFGIMNELRLSQQLCDVTLQVKYQDAPAAQFMAHKVVLASSSPVFKAMFTNGLREQGMEVVSIEGIHPKVMERLIEFAYTASISMGEKCVLHVMNGAVMYQIDSVVRACSDFLVQQLDPSNAIGIANFAEQIGCVELHQRAREYIYMHFGEVAKQEEFFNLSHCQLVTLISRDDLNVRCESEVFHACINWVKYDCEQRRFYVQALLRAVRCHSLTPNFLQMQLQKCEILQSDSRCKDYLVKIFEELTLHKPTQVMPCRAPGSGSGSGSGSGSDDLGANDELISFKDEGEQEEKSSENSSAERDLADVKSSLVNESET

SEQ ID NO: 998 - protein, 174 aa, synthetic construct
  source 1..174: note = RNF125-(GS)1-TCF4 peptide
GSVLSTDSGKSAPASATARALERRRDPELPVTSFDCAVCLEVLHQPVRTRCGHVFCRSCIATSLKNNKWTCPYCRAYLPSEGVPATDVAKRMKSEYKNCAECDTLVCLSEMRAHIRTCQKYIDKYGPGSDDLGANDELISFKDEGEQEEKSSENSSAERDLADVKSSLVNESET

SEQ ID NO: 999 - protein, 176 aa, synthetic construct
  source 1..176: note = RNF125-(GS)2-TCF4 peptide
GSVLSTDSGKSAPASATARALERRRDPELPVTSFDCAVCLEVLHQPVRTRCGHVFCRSCIATSLKNNKWTCPYCRAYLPSEGVPATDVAKRMKSEYKNCAECDTLVCLSEMRAHIRTCQKYIDKYGPGSGSDDLGANDELISFKDEGEQEEKSSENSSAERDLADVKSSLVNESET

SEQ ID NO: 1000 - protein, 178 aa, synthetic construct
  source 1..178: note = RNF125-(GS)3-TCF4 peptide
GSVLSTDSGKSAPASATARALERRRDPELPVTSFDCAVCLEVLHQPVRTRCGHVFCRSCIATSLKNNKWTCPYCRAYLPSEGVPATDVAKRMKSEYKNCAECDTLVCLSEMRAHIRTCQKYIDKYGPGSGSGSDDLGANDELISFKDEGEQEEKSSENSSAERDLADVKSSLVNESET

SEQ ID NO: 1001 - protein, 180 aa, synthetic construct
  source 1..180: note = RNF125-(GS)4-TCF4 peptide
GSVLSTDSGKSAPASATARALERRRDPELPVTSFDCAVCLEVLHQPVRTRCGHVFCRSCIATSLKNNKWTCPYCRAYLPSEGVPATDVAKRMKSEYKNCAECDTLVCLSEMRAHIRTCQKYIDKYGPGSGSGSGSDDLGANDELISFKDEGEQEEKSSENSSAERDLADVKSSLVNESET

SEQ ID NO: 1002 - protein, 182 aa, synthetic construct
  source 1..182: note = RNF125-(GS)5-TCF4 peptide
GSVLSTDSGKSAPASATARALERRRDPELPVTSFDCAVCLEVLHQPVRTRCGHVFCRSCIATSLKNNKWTCPYCRAYLPSEGVPATDVAKRMKSEYKNCAECDTLVCLSEMRAHIRTCQKYIDKYGPGSGSGSGSGSDDLGANDELISFKDEGEQEEKSSENSSAERDLADVKSSLVNESET

SEQ ID NO: 1003 - protein, 184 aa, synthetic construct
  source 1..184: note = RNF125-(GS)6-TCF4 peptide
GSVLSTDSGKSAPASATARALERRRDPELPVTSFDCAVCLEVLHQPVRTRCGHVFCRSCIATSLKNNKWTCPYCRAYLPSEGVPATDVAKRMKSEYKNCAECDTLVCLSEMRAHIRTCQKYIDKYGPGSGSGSGSGSGSDDLGANDELISFKDEGEQEEKSSENSSAERDLADVKSSLVNESET

SEQ ID NO: 1004 - protein, 190 aa, synthetic construct
  source 1..190: note = HA-RNF125-(GS)1-TCF4 peptide
MYPYDVPDYAGSGSGSGSVLSTDSGKSAPASATARALERRRDPELPVTSFDCAVCLEVLHQPVRTRCGHVFCRSCIATSLKNNKWTCPYCRAYLPSEGVPATDVAKRMKSEYKNCAECDTLVCLSEMRAHIRTCQKYIDKYGPGSDDLGANDELISFKDEGEQEEKSSENSSAERDLADVKSSLVNESET

SEQ ID NO: 1005 - protein, 192 aa, synthetic construct
  source 1..192: note = HA-RNF125-(GS)2-TCF4 peptide
MYPYDVPDYAGSGSGSGSVLSTDSGKSAPASATARALERRRDPELPVTSFDCAVCLEVLHQPVRTRCGHVFCRSCIATSLKNNKWTCPYCRAYLPSEGVPATDVAKRMKSEYKNCAECDTLVCLSEMRAHIRTCQKYIDKYGPGSGSDDLGANDELISFKDEGEQEEKSSENSSAERDLADVKSSLVNESET

SEQ ID NO: 1006 - protein, 194 aa, synthetic construct
  source 1..194: note = HA-RNF125-(GS)3-TCF4 peptide
MYPYDVPDYAGSGSGSGSVLSTDSGKSAPASATARALERRRDPELPVTSFDCAVCLEVLHQPVRTRCGHVFCRSCIATSLKNNKWTCPYCRAYLPSEGVPATDVAKRMKSEYKNCAECDTLVCLSEMRAHIRTCQKYIDKYGPGSGSGSDDLGANDELISFKDEGEQEEKSSENSSAERDLADVKSSLVNESET

SEQ ID NO: 1007 - protein, 196 aa, synthetic construct
  source 1..196: note = HA-RNF125-(GS)4-TCF4 peptide
MYPYDVPDYAGSGSGSGSVLSTDSGKSAPASATARALERRRDPELPVTSFDCAVCLEVLHQPVRTRCGHVFCRSCIATSLKNNKWTCPYCRAYLPSEGVPATDVAKRMKSEYKNCAECDTLVCLSEMRAHIRTCQKYIDKYGPGSGSGSGSDDLGANDELISFKDEGEQEEKSSENSSAERDLADVKSSLVNESET

SEQ ID NO: 1008 - protein, 198 aa, synthetic construct
  source 1..198: note = HA-RNF125-(GS)5-TCF4 peptide
MYPYDVPDYAGSGSGSGSVLSTDSGKSAPASATARALERRRDPELPVTSFDCAVCLEVLHQPVRTRCGHVFCRSCIATSLKNNKWTCPYCRAYLPSEGVPATDVAKRMKSEYKNCAECDTLVCLSEMRAHIRTCQKYIDKYGPGSGSGSGSGSDDLGANDELISFKDEGEQEEKSSENSSAERDLADVKSSLVNESET

SEQ ID NO: 1009 - protein, 200 aa, synthetic construct
  source 1..200: note = HA-RNF125-(GS)6-TCF4 peptide
MYPYDVPDYAGSGSGSGSVLSTDSGKSAPASATARALERRRDPELPVTSFDCAVCLEVLHQPVRTRCGHVFCRSCIATSLKNNKWTCPYCRAYLPSEGVPATDVAKRMKSEYKNCAECDTLVCLSEMRAHIRTCQKYIDKYGPGSGSGSGSGSGSDDLGANDELISFKDEGEQEEKSSENSSAERDLADVKSSLVNESET

SEQ ID NO: 1010 - protein, 314 aa, synthetic construct
  source 1..314: note = BC2-(GS)1-CHIP-NLS peptide
MQVQLVESGGGLVQPGGSLTLSCTASGFTLDHYDIGWFRQAPGKEREGVSCINNSDDDTYYADSVKGRFTIFMNNAKDTVYLQMNSLKPEDTAIYYCAEARGCKRGRYEYDFWGQGTQVTVSSGSRLNFGDDIPSALRIAKKKRWNSIEERRIHQESELHSYLSRLIAAERERELEECQRNHEGDEDDSHVRAQQACIEAKHDKYMADMDELFSQVDEKRKKRDIPDYLCGKISFELMREPCITPSGITYDRKDIEEHLQRVGHFDPVTRSPLTQEQLIPNLAMKEVIDAFISENGWVEDYGSGSPAAKRVKLD

SEQ ID NO: 1011 - protein, 316 aa, synthetic construct
  source 1..316: note = BC2-(GS)2-CHIP-NLS peptide
MQVQLVESGGGLVQPGGSLTLSCTASGFTLDHYDIGWFRQAPGKEREGVSCINNSDDDTYYADSVKGRFTIFMNNAKDTVYLQMNSLKPEDTAIYYCAEARGCKRGRYEYDFWGQGTQVTVSSGSGSRLNFGDDIPSALRIAKKKRWNSIEERRIHQESELHSYLSRLIAAERERELEECQRNHEGDEDDSHVRAQQACIEAKHDKYMADMDELFSQVDEKRKKRDIPDYLCGKISFELMREPCITPSGITYDRKDIEEHLQRVGHFDPVTRSPLTQEQLIPNLAMKEVIDAFISENGWVEDYGSGSPAAKRVKLD

SEQ ID NO: 1012 - protein, 318 aa, synthetic construct
  source 1..318: note = BC2-(GS)3-CHIP-NLS peptide
MQVQLVESGGGLVQPGGSLTLSCTASGFTLDHYDIGWFRQAPGKEREGVSCINNSDDDTYYADSVKGRFTIFMNNAKDTVYLQMNSLKPEDTAIYYCAEARGCKRGRYEYDFWGQGTQVTVSSGSGSGSRLNFGDDIPSALRIAKKKRWNSIEERRIHQESELHSYLSRLIAAERERELEECQRNHEGDEDDSHVRAQQACIEAKHDKYMADMDELFSQVDEKRKKRDIPDYLCGKISFELMREPCITPSGITYDRKDIEEHLQRVGHFDPVTRSPLTQEQLIPNLAMKEVIDAFISENGWVEDYGSGSPAAKRVKLD

SEQ ID NO: 1013 - protein, 320 aa, synthetic construct
  source 1..320: note = BC2-(GS)4-CHIP-NLS peptide
MQVQLVESGGGLVQPGGSLTLSCTASGFTLDHYDIGWFRQAPGKEREGVSCINNSDDDTYYADSVKGRFTIFMNNAKDTVYLQMNSLKPEDTAIYYCAEARGCKRGRYEYDFWGQGTQVTVSSGSGSGSGSRLNFGDDIPSALRIAKKKRWNSIEERRIHQESELHSYLSRLIAAERERELEECQRNHEGDEDDSHVRAQQACIEAKHDKYMADMDELFSQVDEKRKKRDIPDYLCGKISFELMREPCITPSGITYDRKDIEEHLQRVGHFDPVTRSPLTQEQLIPNLAMKEVIDAFISENGWVEDYGSGSPAAKRVKLD

SEQ ID NO: 1014 - protein, 322 aa, synthetic construct
  source 1..322: note = BC2-(GS)5-CHIP-NLS peptide
MQVQLVESGGGLVQPGGSLTLSCTASGFTLDHYDIGWFRQAPGKEREGVSCINNSDDDTYYADSVKGRFTIFMNNAKDTVYLQMNSLKPEDTAIYYCAEARGCKRGRYEYDFWGQGTQVTVSSGSGSGSGSGSRLNFGDDIPSALRIAKKKRWNSIEERRIHQESELHSYLSRLIAAERERELEECQRNHEGDEDDSHVRAQQACIEAKHDKYMADMDELFSQVDEKRKKRDIPDYLCGKISFELMREPCITPSGITYDRKDIEEHLQRVGHFDPVTRSPLTQEQLIPNLAMKEVIDAFISENGWVEDYGSGSPAAKRVKLD

SEQ ID NO: 1015 - protein, 324 aa, synthetic construct
  source 1..324: note = BC2-(GS)6-CHIP-NLS peptide
MQVQLVESGGGLVQPGGSLTLSCTASGFTLDHYDIGWFRQAPGKEREGVSCINNSDDDTYYADSVKGRFTIFMNNAKDTVYLQMNSLKPEDTAIYYCAEARGCKRGRYEYDFWGQGTQVTVSSGSGSGSGSGSGSRLNFGDDIPSALRIAKKKRWNSIEERRIHQESELHSYLSRLIAAERERELEECQRNHEGDEDDSHVRAQQACIEAKHDKYMADMDELFSQVDEKRKKRDIPDYLCGKISFELMREPCITPSGITYDRKDIEEHLQRVGHFDPVTRSPLTQEQLIPNLAMKEVIDAFISENGWVEDYGSGSPAAKRVKLD

SEQ ID NO: 1016 - protein, 323 aa, synthetic construct
  source 1..323: note = BC2-(GS)1-CHIP-NLS-HA peptide
MQVQLVESGGGLVQPGGSLTLSCTASGFTLDHYDIGWFRQAPGKEREGVSCINNSDDDTYYADSVKGRFTIFMNNAKDTVYLQMNSLKPEDTAIYYCAEARGCKRGRYEYDFWGQGTQVTVSSGSRLNFGDDIPSALRIAKKKRWNSIEERRIHQESELHSYLSRLIAAERERELEECQRNHEGDEDDSHVRAQQACIEAKHDKYMADMDELFSQVDEKRKKRDIPDYLCGKISFELMREPCITPSGITYDRKDIEEHLQRVGHFDPVTRSPLTQEQLIPNLAMKEVIDAFISENGWVEDYGSGSPAAKRVKLDYPYDVPDYA

SEQ ID NO: 1017 - protein, 325 aa, synthetic construct
  source 1..325: note = BC2-(GS)2-CHIP-NLS-HA peptide
MQVQLVESGGGLVQPGGSLTLSCTASGFTLDHYDIGWFRQAPGKEREGVSCINNSDDDTYYADSVKGRFTIFMNNAKDTVYLQMNSLKPEDTAIYYCAEARGCKRGRYEYDFWGQGTQVTVSSGSGSRLNFGDDIPSALRIAKKKRWNSIEERRIHQESELHSYLSRLIAAERERELEECQRNHEGDEDDSHVRAQQACIEAKHDKYMADMDELFSQVDEKRKKRDIPDYLCGKISFELMREPCITPSGITYDRKDIEEHLQRVGHFDPVTRSPLTQEQLIPNLAMKEVIDAFISENGWVEDYGSGSPAAKRVKLDYPYDVPDYA

SEQ ID NO: 1018 - protein, 327 aa, synthetic construct
  source 1..327: note = BC2-(GS)3-CHIP-NLS-HA peptide
MQVQLVESGGGLVQPGGSLTLSCTASGFTLDHYDIGWFRQAPGKEREGVSCINNSDDDTYYADSVKGRFTIFMNNAKDTVYLQMNSLKPEDTAIYYCAEARGCKRGRYEYDFWGQGTQVTVSSGSGSGSRLNFGDDIPSALRIAKKKRWNSIEERRIHQESELHSYLSRLIAAERERELEECQRNHEGDEDDSHVRAQQACIEAKHDKYMADMDELFSQVDEKRKKRDIPDYLCGKISFELMREPCITPSGITYDRKDIEEHLQRVGHFDPVTRSPLTQEQLIPNLAMKEVIDAFISENGWVEDYGSGSPAAKRVKLDYPYDVPDYA

SEQ ID NO: 1019 - protein, 329 aa, synthetic construct
  source 1..329: note = BC2-(GS)4-CHIP-NLS-HA peptide
MQVQLVESGGGLVQPGGSLTLSCTASGFTLDHYDIGWFRQAPGKEREGVSCINNSDDDTYYADSVKGRFTIFMNNAKDTVYLQMNSLKPEDTAIYYCAEARGCKRGRYEYDFWGQGTQVTVSSGSGSGSGSRLNFGDDIPSALRIAKKKRWNSIEERRIHQESELHSYLSRLIAAERERELEECQRNHEGDEDDSHVRAQQACIEAKHDKYMADMDELFSQVDEKRKKRDIPDYLCGKISFELMREPCITPSGITYDRKDIEEHLQRVGHFDPVTRSPLTQEQLIPNLAMKEVIDAFISENGWVEDYGSGSPAAKRVKLDYPYDVPDYA

SEQ ID NO: 1020 - protein, 331 aa, synthetic construct
  source 1..331: note = BC2-(GS)5-CHIP-NLS-HA peptide
MQVQLVESGGGLVQPGGSLTLSCTASGFTLDHYDIGWFRQAPGKEREGVSCINNSDDDTYYADSVKGRFTIFMNNAKDTVYLQMNSLKPEDTAIYYCAEARGCKRGRYEYDFWGQGTQVTVSSGSGSGSGSGSRLNFGDDIPSALRIAKKKRWNSIEERRIHQESELHSYLSRLIAAERERELEECQRNHEGDEDDSHVRAQQACIEAKHDKYMADMDELFSQVDEKRKKRDIPDYLCGKISFELMREPCITPSGITYDRKDIEEHLQRVGHFDPVTRSPLTQEQLIPNLAMKEVIDAFISENGWVEDYGSGSPAAKRVKLDYPYDVPDYA

SEQ ID NO: 1021 - protein, 333 aa, synthetic construct
  source 1..333: note = BC2-(GS)6-CHIP-NLS-HA peptide
MQVQLVESGGGLVQPGGSLTLSCTASGFTLDHYDIGWFRQAPGKEREGVSCINNSDDDTYYADSVKGRFTIFMNNAKDTVYLQMNSLKPEDTAIYYCAEARGCKRGRYEYDFWGQGTQVTVSSGSGSGSGSGSGSRLNFGDDIPSALRIAKKKRWNSIEERRIHQESELHSYLSRLIAAERERELEECQRNHEGDEDDSHVRAQQACIEAKHDKYMADMDELFSQVDEKRKKRDIPDYLCGKISFELMREPCITPSGITYDRKDIEEHLQRVGHFDPVTRSPLTQEQLIPNLAMKEVIDAFISENGWVEDYGSGSPAAKRVKLDYPYDVPDYA

SEQ ID NO: 1022 - protein, 174 aa, synthetic construct
  source 1..174: note = NLS-DCAF1-(GS)1-BC2 peptide
PAAKRVKLDGSGSGSQAPINFTSRLNRRASFPKYGGVDGGCFDRHLIFSRGSQVQLVESGGGLVQPGGSLTLSCTASGFTLDHYDIGWFRQAPGKEREGVSCINNSDDDTYYADSVKGRFTIFMNNAKDTVYLQMNSLKPEDTAIYYCAEARGCKRGRYEYDFWGQGTQVTVSS

SEQ ID NO: 1023 - protein, 176 aa, synthetic construct
  source 1..176: note = NLS-DCAF1-(GS)2-BC2 peptide
PAAKRVKLDGSGSGSQAPINFTSRLNRRASFPKYGGVDGGCFDRHLIFSRGSGSQVQLVESGGGLVQPGGSLTLSCTASGFTLDHYDIGWFRQAPGKEREGVSCINNSDDDTYYADSVKGRFTIFMNNAKDTVYLQMNSLKPEDTAIYYCAEARGCKRGRYEYDFWGQGTQVTVSS

SEQ ID NO: 1024 - protein, 178 aa, synthetic construct
  source 1..178: note = NLS-DCAF1-(GS)3-BC2 peptide
PAAKRVKLDGSGSGSQAPINFTSRLNRRASFPKYGGVDGGCFDRHLIFSRGSGSGSQVQLVESGGGLVQPGGSLTLSCTASGFTLDHYDIGWFRQAPGKEREGVSCINNSDDDTYYADSVKGRFTIFMNNAKDTVYLQMNSLKPEDTAIYYCAEARGCKRGRYEYDFWGQGTQVTVSS

SEQ ID NO: 1025 - protein, 180 aa, synthetic construct
  source 1..180: note = NLS-DCAF1-(GS)4-BC2 peptide
PAAKRVKLDGSGSGSQAPINFTSRLNRRASFPKYGGVDGGCFDRHLIFSRGSGSGSGSQVQLVESGGGLVQPGGSLTLSCTASGFTLDHYDIGWFRQAPGKEREGVSCINNSDDDTYYADSVKGRFTIFMNNAKDTVYLQMNSLKPEDTAIYYCAEARGCKRGRYEYDFWGQGTQVTVSS

SEQ ID NO: 1026 - protein, 182 aa, synthetic construct
  source 1..182: note = NLS-DCAF1-(GS)5-BC2 peptide
PAAKRVKLDGSGSGSQAPINFTSRLNRRASFPKYGGVDGGCFDRHLIFSRGSGSGSGSGSQVQLVESGGGLVQPGGSLTLSCTASGFTLDHYDIGWFRQAPGKEREGVSCINNSDDDTYYADSVKGRFTIFMNNAKDTVYLQMNSLKPEDTAIYYCAEARGCKRGRYEYDFWGQGTQVTVSS

SEQ ID NO: 1027 - protein, 184 aa, synthetic construct
  source 1..184: note = NLS-DCAF1-(GS)6-BC2 peptide
PAAKRVKLDGSGSGSQAPINFTSRLNRRASFPKYGGVDGGCFDRHLIFSRGSGSGSGSGSGSQVQLVESGGGLVQPGGSLTLSCTASGFTLDHYDIGWFRQAPGKEREGVSCINNSDDDTYYADSVKGRFTIFMNNAKDTVYLQMNSLKPEDTAIYYCAEARGCKRGRYEYDFWGQGTQVTVSS

SEQ ID NO: 1028 - protein, 184 aa, synthetic construct
  source 1..184: note = HA-NLS-DCAF1-(GS)1-BC2 peptide
MYPYDVPDYAPAAKRVKLDGSGSGSQAPINFTSRLNRRASFPKYGGVDGGCFDRHLIFSRGSQVQLVESGGGLVQPGGSLTLSCTASGFTLDHYDIGWFRQAPGKEREGVSCINNSDDDTYYADSVKGRFTIFMNNAKDTVYLQMNSLKPEDTAIYYCAEARGCKRGRYEYDFWGQGTQVTVSS

SEQ ID NO: 1029 - protein, 186 aa, synthetic construct
  source 1..186: note = HA-NLS-DCAF1-(GS)2-BC2 peptide
MYPYDVPDYAPAAKRVKLDGSGSGSQAPINFTSRLNRRASFPKYGGVDGGCFDRHLIFSRGSGSQVQLVESGGGLVQPGGSLTLSCTASGFTLDHYDIGWFRQAPGKEREGVSCINNSDDDTYYADSVKGRFTIFMNNAKDTVYLQMNSLKPEDTAIYYCAEARGCKRGRYEYDFWGQGTQVTVSS

SEQ ID NO: 1030 - protein, 188 aa, synthetic construct
  source 1..188: note = HA-NLS-DCAF1-(GS)3-BC2 peptide
MYPYDVPDYAPAAKRVKLDGSGSGSQAPINFTSRLNRRASFPKYGGVDGGCFDRHLIFSRGSGSGSQVQLVESGGGLVQPGGSLTLSCTASGFTLDHYDIGWFRQAPGKEREGVSCINNSDDDTYYADSVKGRFTIFMNNAKDTVYLQMNSLKPEDTAIYYCAEARGCKRGRYEYDFWGQGTQVTVSS

SEQ ID NO: 1031 - protein, 190 aa, synthetic construct
  source 1..190: note = HA-NLS-DCAF1-(GS)4-BC2 peptide
MYPYDVPDYAPAAKRVKLDGSGSGSQAPINFTSRLNRRASFPKYGGVDGGCFDRHLIFSRGSGSGSGSQVQLVESGGGLVQPGGSLTLSCTASGFTLDHYDIGWFRQAPGKEREGVSCINNSDDDTYYADSVKGRFTIFMNNAKDTVYLQMNSLKPEDTAIYYCAEARGCKRGRYEYDFWGQGTQVTVSS

SEQ ID NO: 1032 - protein, 192 aa, synthetic construct
  source 1..192: note = HA-NLS-DCAF1-(GS)5-BC2 peptide
MYPYDVPDYAPAAKRVKLDGSGSGSQAPINFTSRLNRRASFPKYGGVDGGCFDRHLIFSRGSGSGSGSGSQVQLVESGGGLVQPGGSLTLSCTASGFTLDHYDIGWFRQAPGKEREGVSCINNSDDDTYYADSVKGRFTIFMNNAKDTVYLQMNSLKPEDTAIYYCAEARGCKRGRYEYDFWGQGTQVTVSS

SEQ ID NO: 1033 - protein, 194 aa, synthetic construct
  source 1..194: note = HA-NLS-DCAF1-(GS)6-BC2 peptide
MYPYDVPDYAPAAKRVKLDGSGSGSQAPINFTSRLNRRASFPKYGGVDGGCFDRHLIFSRGSGSGSGSGSGSQVQLVESGGGLVQPGGSLTLSCTASGFTLDHYDIGWFRQAPGKEREGVSCINNSDDDTYYADSVKGRFTIFMNNAKDTVYLQMNSLKPEDTAIYYCAEARGCKRGRYEYDFWGQGTQVTVSS

SEQ ID NO: 1034 - protein, 495 aa, synthetic construct
  source 1..495: note = NLS-BC2-(GS)1-E6AP peptide
PAAKRVKLDGSGSGSQVQLVESGGGLVQPGGSLTLSCTASGFTLDHYDIGWFRQAPGKEREGVSCINNSDDDTYYADSVKGRFTIFMNNAKDTVYLQMNSLKPEDTAIYYCAEARGCKRGRYEYDFWGQGTQVTVSSGSNPYLRLKVRRDHIIDDALVRLEMIAMENPADLKKQLYVEFEGEQGVDEGGVSKEFFQLVVEEIFNPDIGMFTYDESTKLFWFNPSSFETEGQFTLIGIVLGLAIYNNCILDVHFPMVVYRKLMGKKGTFRDLGDSHPVLYQSLKDLLEYEGNVEDDMMITFQISQTDLFGNPMMYDLKENGDKIPITNENRKEFVNLYSDYILNKSVEKQFKAFRRGFHMVTNESPLKYLFRPEEIELLICGSRNLDFQALEETTEYDGGYTRDSVLIREFWEIVHSFTDEQKRLFLQFTTGTDRAPVGGLGKLKMIIAKNGPDTERLPTSHTCFNVLLLPEYSSKEKLKERLLKAITYAKGFGML

SEQ ID NO: 1035 - protein, 497 aa, synthetic construct
  source 1..497: note = NLS-BC2-(GS)2-E6AP peptide
PAAKRVKLDGSGSGSQVQLVESGGGLVQPGGSLTLSCTASGFTLDHYDIGWFRQAPGKEREGVSCINNSDDDTYYADSVKGRFTIFMNNAKDTVYLQMNSLKPEDTAIYYCAEARGCKRGRYEYDFWGQGTQVTVSSGSGSNPYLRLKVRRDHIIDDALVRLEMIAMENPADLKKQLYVEFEGEQGVDEGGVSKEFFQLVVEEIFNPDIGMFTYDESTKLFWFNPSSFETEGQFTLIGIVLGLAIYNNCILDVHFPMVVYRKLMGKKGTFRDLGDSHPVLYQSLKDLLEYEGNVEDDMMITFQISQTDLFGNPMMYDLKENGDKIPITNENRKEFVNLYSDYILNKSVEKQFKAFRRGFHMVTNESPLKYLFRPEEIELLICGSRNLDFQALEETTEYDGGYTRDSVLIREFWEIVHSFTDEQKRLFLQFTTGTDRAPVGGLGKLKMIIAKNGPDTERLPTSHTCFNVLLLPEYSSKEKLKERLLKAITYAKGFGML

SEQ ID NO: 1036 - protein, 499 aa, synthetic construct
  source 1..499: note = NLS-BC2(GS)3-E6AP peptide
PAAKRVKLDGSGSGSQVQLVESGGGLVQPGGSLTLSCTASGFTLDHYDIGWFRQAPGKEREGVSCINNSDDDTYYADSVKGRFTIFMNNAKDTVYLQMNSLKPEDTAIYYCAEARGCKRGRYEYDFWGQGTQVTVSSGSGSGSNPYLRLKVRRDHIIDDALVRLEMIAMENPADLKKQLYVEFEGEQGVDEGGVSKEFFQLVVEEIFNPDIGMFTYDESTKLFWFNPSSFETEGQFTLIGIVLGLAIYNNCILDVHFPMVVYRKLMGKKGTFRDLGDSHPVLYQSLKDLLEYEGNVEDDMMITFQISQTDLFGNPMMYDLKENGDKIPITNENRKEFVNLYSDYILNKSVEKQFKAFRRGFHMVTNESPLKYLFRPEEIELLICGSRNLDFQALEETTEYDGGYTRDSVLIREFWEIVHSFTDEQKRLFLQFTTGTDRAPVGGLGKLKMIIAKNGPDTERLPTSHTCFNVLLLPEYSSKEKLKERLLKAITYAKGFGML

SEQ ID NO: 1037 - protein, 501 aa, synthetic construct
  source 1..501: note = NLS-BC2-(GS)4-E6AP peptide
PAAKRVKLDGSGSGSQVQLVESGGGLVQPGGSLTLSCTASGFTLDHYDIGWFRQAPGKEREGVSCINNSDDDTYYADSVKGRFTIFMNNAKDTVYLQMNSLKPEDTAIYYCAEARGCKRGRYEYDFWGQGTQVTVSSGSGSGSGSNPYLRLKVRRDHIIDDALVRLEMIAMENPADLKKQLYVEFEGEQGVDEGGVSKEFFQLVVEEIFNPDIGMFTYDESTKLFWFNPSSFETEGQFTLIGIVLGLAIYNNCILDVHFPMVVYRKLMGKKGTFRDLGDSHPVLYQSLKDLLEYEGNVEDDMMITFQISQTDLFGNPMMYDLKENGDKIPITNENRKEFVNLYSDYILNKSVEKQFKAFRRGFHMVTNESPLKYLFRPEEIELLICGSRNLDFQALEETTEYDGGYTRDSVLIREFWEIVHSFTDEQKRLFLQFTTGTDRAPVGGLGKLKMIIAKNGPDTERLPTSHTCFNVLLLPEYSSKEKLKERLLKAITYAKGFGML

SEQ ID NO: 1038 - protein, 503 aa, synthetic construct
  source 1..503: note = NLS-BC2-(GS)5-E6AP peptide
PAAKRVKLDGSGSGSQVQLVESGGGLVQPGGSLTLSCTASGFTLDHYDIGWFRQAPGKEREGVSCINNSDDDTYYADSVKGRFTIFMNNAKDTVYLQMNSLKPEDTAIYYCAEARGCKRGRYEYDFWGQGTQVTVSSGSGSGSGSGSNPYLRLKVRRDHIIDDALVRLEMIAMENPADLKKQLYVEFEGEQGVDEGGVSKEFFQLVVEEIFNPDIGMFTYDESTKLFWFNPSSFETEGQFTLIGIVLGLAIYNNCILDVHFPMVVYRKLMGKKGTFRDLGDSHPVLYQSLKDLLEYEGNVEDDMMITFQISQTDLFGNPMMYDLKENGDKIPITNENRKEFVNLYSDYILNKSVEKQFKAFRRGFHMVTNESPLKYLFRPEEIELLICGSRNLDFQALEETTEYDGGYTRDSVLIREFWEIVHSFTDEQKRLFLQFTTGTDRAPVGGLGKLKMIIAKNGPDTERLPTSHTCFNVLLLPEYSSKEKLKERLLKAITYAKGFGML

SEQ ID NO: 1039 - protein, 505 aa, synthetic construct
  source 1..505: note = NLS-BC2-(GS)6-E6AP peptide
PAAKRVKLDGSGSGSQVQLVESGGGLVQPGGSLTLSCTASGFTLDHYDIGWFRQAPGKEREGVSCINNSDDDTYYADSVKGRFTIFMNNAKDTVYLQMNSLKPEDTAIYYCAEARGCKRGRYEYDFWGQGTQVTVSSGSGSGSGSGSGSNPYLRLKVRRDHIIDDALVRLEMIAMENPADLKKQLYVEFEGEQGVDEGGVSKEFFQLVVEEIFNPDIGMFTYDESTKLFWFNPSSFETEGQFTLIGIVLGLAIYNNCILDVHFPMVVYRKLMGKKGTFRDLGDSHPVLYQSLKDLLEYEGNVEDDMMITFQISQTDLFGNPMMYDLKENGDKIPITNENRKEFVNLYSDYILNKSVEKQFKAFRRGFHMVTNESPLKYLFRPEEIELLICGSRNLDFQALEETTEYDGGYTRDSVLIREFWEIVHSFTDEQKRLFLQFTTGTDRAPVGGLGKLKMIIAKNGPDTERLPTSHTCFNVLLLPEYSSKEKLKERLLKAITYAKGFGML

SEQ ID NO: 1040 - protein, 505 aa, synthetic construct
  source 1..505: note = HA-NLS-BC2-(GS)1-E6AP peptide
MYPYDVPDYAPAAKRVKLDGSGSGSQVQLVESGGGLVQPGGSLTLSCTASGFTLDHYDIGWFRQAPGKEREGVSCINNSDDDTYYADSVKGRFTIFMNNAKDTVYLQMNSLKPEDTAIYYCAEARGCKRGRYEYDFWGQGTQVTVSSGSNPYLRLKVRRDHIIDDALVRLEMIAMENPADLKKQLYVEFEGEQGVDEGGVSKEFFQLVVEEIFNPDIGMFTYDESTKLFWFNPSSFETEGQFTLIGIVLGLAIYNNCILDVHFPMVVYRKLMGKKGTFRDLGDSHPVLYQSLKDLLEYEGNVEDDMMITFQISQTDLFGNPMMYDLKENGDKIPITNENRKEFVNLYSDYILNKSVEKQFKAFRRGFHMVTNESPLKYLFRPEEIELLICGSRNLDFQALEETTEYDGGYTRDSVLIREFWEIVHSFTDEQKRLFLQFTTGTDRAPVGGLGKLKMIIAKNGPDTERLPTSHTCFNVLLLPEYSSKEKLKERLLKAITYAKGFGML

SEQ ID NO: 1041 - protein, 507 aa, synthetic construct
  source 1..507: note = HA-NLS-BC2-(GS)2-E6AP peptide
MYPYDVPDYAPAAKRVKLDGSGSGSQVQLVESGGGLVQPGGSLTLSCTASGFTLDHYDIGWFRQAPGKEREGVSCINNSDDDTYYADSVKGRFTIFMNNAKDTVYLQMNSLKPEDTAIYYCAEARGCKRGRYEYDFWGQGTQVTVSSGSGSNPYLRLKVRRDHIIDDALVRLEMIAMENPADLKKQLYVEFEGEQGVDEGGVSKEFFQLVVEEIFNPDIGMFTYDESTKLFWFNPSSFETEGQFTLIGIVLGLAIYNNCILDVHFPMVVYRKLMGKKGTFRDLGDSHPVLYQSLKDLLEYEGNVEDDMMITFQISQTDLFGNPMMYDLKENGDKIPITNENRKEFVNLYSDYILNKSVEKQFKAFRRGFHMVTNESPLKYLFRPEEIELLICGSRNLDFQALEETTEYDGGYTRDSVLIREFWEIVHSFTDEQKRLFLQFTTGTDRAPVGGLGKLKMIIAKNGPDTERLPTSHTCFNVLLLPEYSSKEKLKERLLKAITYAKGFGML

SEQ ID NO: 1042 - protein, 509 aa, synthetic construct
  source 1..509: note = HA-NLS-BC2(GS)3-E6AP peptide
MYPYDVPDYAPAAKRVKLDGSGSGSQVQLVESGGGLVQPGGSLTLSCTASGFTLDHYDIGWFRQAPGKEREGVSCINNSDDDTYYADSVKGRFTIFMNNAKDTVYLQMNSLKPEDTAIYYCAEARGCKRGRYEYDFWGQGTQVTVSSGSGSGSNPYLRLKVRRDHIIDDALVRLEMIAMENPADLKKQLYVEFEGEQGVDEGGVSKEFFQLVVEEIFNPDIGMFTYDESTKLFWFNPSSFETEGQFTLIGIVLGLAIYNNCILDVHFPMVVYRKLMGKKGTFRDLGDSHPVLYQSLKDLLEYEGNVEDDMMITFQISQTDLFGNPMMYDLKENGDKIPITNENRKEFVNLYSDYILNKSVEKQFKAFRRGFHMVTNESPLKYLFRPEEIELLICGSRNLDFQALEETTEYDGGYTRDSVLIREFWEIVHSFTDEQKRLFLQFTTGTDRAPVGGLGKLKMIIAKNGPDTERLPTSHTCFNVLLLPEYSSKEKLKERLLKAITYAKGFGML

SEQ ID NO: 1043 - protein, 511 aa, synthetic construct
  source 1..511: note = HA-NLS-BC2-(GS)4-E6AP peptide
MYPYDVPDYAPAAKRVKLDGSGSGSQVQLVESGGGLVQPGGSLTLSCTASGFTLDHYDIGWFRQAPGKEREGVSCINNSDDDTYYADSVKGRFTIFMNNAKDTVYLQMNSLKPEDTAIYYCAEARGCKRGRYEYDFWGQGTQVTVSSGSGSGSGSNPYLRLKVRRDHIIDDALVRLEMIAMENPADLKKQLYVEFEGEQGVDEGGVSKEFFQLVVEEIFNPDIGMFTYDESTKLFWFNPSSFETEGQFTLIGIVLGLAIYNNCILDVHFPMVVYRKLMGKKGTFRDLGDSHPVLYQSLKDLLEYEGNVEDDMMITFQISQTDLFGNPMMYDLKENGDKIPITNENRKEFVNLYSDYILNKSVEKQFKAFRRGFHMVTNESPLKYLFRPEEIELLICGSRNLDFQALEETTEYDGGYTRDSVLIREFWEIVHSFTDEQKRLFLQFTTGTDRAPVGGLGKLKMIIAKNGPDTERLPTSHTCFNVLLLPEYSSKEKLKERLLKAITYAKGFGML

SEQ ID NO: 1044 - protein, 513 aa, synthetic construct
  source 1..513: note = HA-NLS-BC2-(GS)5-E6AP peptide
MYPYDVPDYAPAAKRVKLDGSGSGSQVQLVESGGGLVQPGGSLTLSCTASGFTLDHYDIGWFRQAPGKEREGVSCINNSDDDTYYADSVKGRFTIFMNNAKDTVYLQMNSLKPEDTAIYYCAEARGCKRGRYEYDFWGQGTQVTVSSGSGSGSGSGSNPYLRLKVRRDHIIDDALVRLEMIAMENPADLKKQLYVEFEGEQGVDEGGVSKEFFQLVVEEIFNPDIGMFTYDESTKLFWFNPSSFETEGQFTLIGIVLGLAIYNNCILDVHFPMVVYRKLMGKKGTFRDLGDSHPVLYQSLKDLLEYEGNVEDDMMITFQISQTDLFGNPMMYDLKENGDKIPITNENRKEFVNLYSDYILNKSVEKQFKAFRRGFHMVTNESPLKYLFRPEEIELLICGSRNLDFQALEETTEYDGGYTRDSVLIREFWEIVHSFTDEQKRLFLQFTTGTDRAPVGGLGKLKMIIAKNGPDTERLPTSHTCFNVLLLPEYSSKEKLKERLLKAITYAKGFGML

SEQ ID NO: 1045 - protein, 515 aa, synthetic construct
  source 1..515: note = HA-NLS-BC2-(GS)6-E6AP peptide
MYPYDVPDYAPAAKRVKLDGSGSGSQVQLVESGGGLVQPGGSLTLSCTASGFTLDHYDIGWFRQAPGKEREGVSCINNSDDDTYYADSVKGRFTIFMNNAKDTVYLQMNSLKPEDTAIYYCAEARGCKRGRYEYDFWGQGTQVTVSSGSGSGSGSGSGSNPYLRLKVRRDHIIDDALVRLEMIAMENPADLKKQLYVEFEGEQGVDEGGVSKEFFQLVVEEIFNPDIGMFTYDESTKLFWFNPSSFETEGQFTLIGIVLGLAIYNNCILDVHFPMVVYRKLMGKKGTFRDLGDSHPVLYQSLKDLLEYEGNVEDDMMITFQISQTDLFGNPMMYDLKENGDKIPITNENRKEFVNLYSDYILNKSVEKQFKAFRRGFHMVTNESPLKYLFRPEEIELLICGSRNLDFQALEETTEYDGGYTRDSVLIREFWEIVHSFTDEQKRLFLQFTTGTDRAPVGGLGKLKMIIAKNGPDTERLPTSHTCFNVLLLPEYSSKEKLKERLLKAITYAKGFGML

SEQ ID NO: 1046 - protein, 491 aa, synthetic construct
  source 1..491: note = FBXW7a-(GS)1-BC2 peptide
NQELLSVGSKRRRTGGSLRGNPSSSQVDEEQMNRVVEEEQQQQLRQQEEEHTARNGEVVGVEPRPGGQNDSQQGQLEENNNRFISVDEDSSGNQEEQEEDEEHAGEQDEEDEEEEEMDQESDDFDQSDDSSREDEHTHTNSVTNSSSIVDLPVHQLSSPFYTKTTKMKRKLDHGSEVRSFSLGKKPCKVSEYTSTTGLVPCSATPTTFGDLRAANGQGQQRRRITSVQPPTGLQEWLKMFQSWSGPEKLLALDELIDSCEPTQVKHMMQVIEPQFQRDFISLLPKELALYVLSFLEPKDLLQAAQTCRYWRILAEDNLLWREKCKEEGIDEPLHIKRRKVIKPGFIHSPWKSAYIRQHRIDTNSRRGGSQVQLVESGGGLVQPGGSLTLSCTASGFTLDHYDIGWFRQAPGKEREGVSCINNSDDDTYYADSVKGRFTIFMNNAKDTVYLQMNSLKPEDTAIYYCAEARGCKRGRYEYDFWGQGTQVTVSS

SEQ ID NO: 1047 - protein, 493 aa, synthetic construct
  source 1..493: note = FBXW7a-(GS)2-BC2 peptide
NQELLSVGSKRRRTGGSLRGNPSSSQVDEEQMNRVVEEEQQQQLRQQEEEHTARNGEVVGVEPRPGGQNDSQQGQLEENNNRFISVDEDSSGNQEEQEEDEEHAGEQDEEDEEEEEMDQESDDFDQSDDSSREDEHTHTNSVTNSSSIVDLPVHQLSSPFYTKTTKMKRKLDHGSEVRSFSLGKKPCKVSEYTSTTGLVPCSATPTTFGDLRAANGQGQQRRRITSVQPPTGLQEWLKMFQSWSGPEKLLALDELIDSCEPTQVKHMMQVIEPQFQRDFISLLPKELALYVLSFLEPKDLLQAAQTCRYWRILAEDNLLWREKCKEEGIDEPLHIKRRKVIKPGFIHSPWKSAYIRQHRIDTNSRRGGSGSQVQLVESGGGLVQPGGSLTLSCTASGFTLDHYDIGWFRQAPGKEREGVSCINNSDDDTYYADSVKGRFTIFMNNAKDTVYLQMNSLKPEDTAIYYCAEARGCKRGRYEYDFWGQGTQVTVSS

SEQ ID NO: 1048 - protein, 495 aa, synthetic construct
  source 1..495: note = FBXW7a-(GS)3-BC2 peptide
NQELLSVGSKRRRTGGSLRGNPSSSQVDEEQMNRVVEEEQQQQLRQQEEEHTARNGEVVGVEPRPGGQNDSQQGQLEENNNRFISVDEDSSGNQEEQEEDEEHAGEQDEEDEEEEEMDQESDDFDQSDDSSREDEHTHTNSVTNSSSIVDLPVHQLSSPFYTKTTKMKRKLDHGSEVRSFSLGKKPCKVSEYTSTTGLVPCSATPTTFGDLRAANGQGQQRRRITSVQPPTGLQEWLKMFQSWSGPEKLLALDELIDSCEPTQVKHMMQVIEPQFQRDFISLLPKELALYVLSFLEPKDLLQAAQTCRYWRILAEDNLLWREKCKEEGIDEPLHIKRRKVIKPGFIHSPWKSAYIRQHRIDTNSRRGGSGSGSQVQLVESGGGLVQPGGSLTLSCTASGFTLDHYDIGWFRQAPGKEREGVSCINNSDDDTYYADSVKGRFTIFMNNAKDTVYLQMNSLKPEDTAIYYCAEARGCKRGRYEYDFWGQGTQVTVSS

SEQ ID NO: 1049 - protein, 497 aa, synthetic construct
  source 1..497: note = FBXW7a-(GS)4-BC2 peptide
NQELLSVGSKRRRTGGSLRGNPSSSQVDEEQMNRVVEEEQQQQLRQQEEEHTARNGEVVGVEPRPGGQNDSQQGQLEENNNRFISVDEDSSGNQEEQEEDEEHAGEQDEEDEEEEEMDQESDDFDQSDDSSREDEHTHTNSVTNSSSIVDLPVHQLSSPFYTKTTKMKRKLDHGSEVRSFSLGKKPCKVSEYTSTTGLVPCSATPTTFGDLRAANGQGQQRRRITSVQPPTGLQEWLKMFQSWSGPEKLLALDELIDSCEPTQVKHMMQVIEPQFQRDFISLLPKELALYVLSFLEPKDLLQAAQTCRYWRILAEDNLLWREKCKEEGIDEPLHIKRRKVIKPGFIHSPWKSAYIRQHRIDTNSRRGGSGSGSGSQVQLVESGGGLVQPGGSLTLSCTASGFTLDHYDIGWFRQAPGKEREGVSCINNSDDDTYYADSVKGRFTIFMNNAKDTVYLQMNSLKPEDTAIYYCAEARGCKRGRYEYDFWGQGTQVTVSS

SEQ ID NO: 1050 - protein, 499 aa, synthetic construct
  source 1..499: note = FBXW7a-(GS)5-BC2 peptide
NQELLSVGSKRRRTGGSLRGNPSSSQVDEEQMNRVVEEEQQQQLRQQEEEHTARNGEVVGVEPRPGGQNDSQQGQLEENNNRFISVDEDSSGNQEEQEEDEEHAGEQDEEDEEEEEMDQESDDFDQSDDSSREDEHTHTNSVTNSSSIVDLPVHQLSSPFYTKTTKMKRKLDHGSEVRSFSLGKKPCKVSEYTSTTGLVPCSATPTTFGDLRAANGQGQQRRRITSVQPPTGLQEWLKMFQSWSGPEKLLALDELIDSCEPTQVKHMMQVIEPQFQRDFISLLPKELALYVLSFLEPKDLLQAAQTCRYWRILAEDNLLWREKCKEEGIDEPLHIKRRKVIKPGFIHSPWKSAYIRQHRIDTNSRRGGSGSGSGSGSQVQLVESGGGLVQPGGSLTLSCTASGFTLDHYDIGWFRQAPGKEREGVSCINNSDDDTYYADSVKGRFTIFMNNAKDTVYLQMNSLKPEDTAIYYCAEARGCKRGRYEYDFWGQGTQVTVSS

SEQ ID NO: 1051 - protein, 501 aa, synthetic construct
  source 1..501: note = FBXW7a-(GS)6-BC2 peptide
NQELLSVGSKRRRTGGSLRGNPSSSQVDEEQMNRVVEEEQQQQLRQQEEEHTARNGEVVGVEPRPGGQNDSQQGQLEENNNRFISVDEDSSGNQEEQEEDEEHAGEQDEEDEEEEEMDQESDDFDQSDDSSREDEHTHTNSVTNSSSIVDLPVHQLSSPFYTKTTKMKRKLDHGSEVRSFSLGKKPCKVSEYTSTTGLVPCSATPTTFGDLRAANGQGQQRRRITSVQPPTGLQEWLKMFQSWSGPEKLLALDELIDSCEPTQVKHMMQVIEPQFQRDFISLLPKELALYVLSFLEPKDLLQAAQTCRYWRILAEDNLLWREKCKEEGIDEPLHIKRRKVIKPGFIHSPWKSAYIRQHRIDTNSRRGGSGSGSGSGSGSQVQLVESGGGLVQPGGSLTLSCTASGFTLDHYDIGWFRQAPGKEREGVSCINNSDDDTYYADSVKGRFTIFMNNAKDTVYLQMNSLKPEDTAIYYCAEARGCKRGRYEYDFWGQGTQVTVSS

SEQ ID NO: 1052 - protein, 501 aa, synthetic construct
  source 1..501: note = HA-FBXW7a-(GS)1-BC2 peptide
MYPYDVPDYANQELLSVGSKRRRTGGSLRGNPSSSQVDEEQMNRVVEEEQQQQLRQQEEEHTARNGEVVGVEPRPGGQNDSQQGQLEENNNRFISVDEDSSGNQEEQEEDEEHAGEQDEEDEEEEEMDQESDDFDQSDDSSREDEHTHTNSVTNSSSIVDLPVHQLSSPFYTKTTKMKRKLDHGSEVRSFSLGKKPCKVSEYTSTTGLVPCSATPTTFGDLRAANGQGQQRRRITSVQPPTGLQEWLKMFQSWSGPEKLLALDELIDSCEPTQVKHMMQVIEPQFQRDFISLLPKELALYVLSFLEPKDLLQAAQTCRYWRILAEDNLLWREKCKEEGIDEPLHIKRRKVIKPGFIHSPWKSAYIRQHRIDTNSRRGGSQVQLVESGGGLVQPGGSLTLSCTASGFTLDHYDIGWFRQAPGKEREGVSCINNSDDDTYYADSVKGRFTIFMNNAKDTVYLQMNSLKPEDTAIYYCAEARGCKRGRYEYDFWGQGTQVTVSS

SEQ ID NO: 1053 - protein, 503 aa, synthetic construct
  source 1..503: note = HA-FBXW7a-(GS)2-BC2 peptide
MYPYDVPDYANQELLSVGSKRRRTGGSLRGNPSSSQVDEEQMNRVVEEEQQQQLRQQEEEHTARNGEVVGVEPRPGGQNDSQQGQLEENNNRFISVDEDSSGNQEEQEEDEEHAGEQDEEDEEEEEMDQESDDFDQSDDSSREDEHTHTNSVTNSSSIVDLPVHQLSSPFYTKTTKMKRKLDHGSEVRSFSLGKKPCKVSEYTSTTGLVPCSATPTTFGDLRAANGQGQQRRRITSVQPPTGLQEWLKMFQSWSGPEKLLALDELIDSCEPTQVKHMMQVIEPQFQRDFISLLPKELALYVLSFLEPKDLLQAAQTCRYWRILAEDNLLWREKCKEEGIDEPLHIKRRKVIKPGFIHSPWKSAYIRQHRIDTNSRRGGSGSQVQLVESGGGLVQPGGSLTLSCTASGFTLDHYDIGWFRQAPGKEREGVSCINNSDDDTYYADSVKGRFTIFMNNAKDTVYLQMNSLKPEDTAIYYCAEARGCKRGRYEYDFWGQGTQVTVSS

SEQ ID NO: 1054 - protein, 505 aa, synthetic construct
  source 1..505: note = HA-FBXW7a-(GS)3-BC2 peptide
MYPYDVPDYANQELLSVGSKRRRTGGSLRGNPSSSQVDEEQMNRVVEEEQQQQLRQQEEEHTARNGEVVGVEPRPGGQNDSQQGQLEENNNRFISVDEDSSGNQEEQEEDEEHAGEQDEEDEEEEEMDQESDDFDQSDDSSREDEHTHTNSVTNSSSIVDLPVHQLSSPFYTKTTKMKRKLDHGSEVRSFSLGKKPCKVSEYTSTTGLVPCSATPTTFGDLRAANGQGQQRRRITSVQPPTGLQEWLKMFQSWSGPEKLLALDELIDSCEPTQVKHMMQVIEPQFQRDFISLLPKELALYVLSFLEPKDLLQAAQTCRYWRILAEDNLLWREKCKEEGIDEPLHIKRRKVIKPGFIHSPWKSAYIRQHRIDTNSRRGGSGSGSQVQLVESGGGLVQPGGSLTLSCTASGFTLDHYDIGWFRQAPGKEREGVSCINNSDDDTYYADSVKGRFTIFMNNAKDTVYLQMNSLKPEDTAIYYCAEARGCKRGRYEYDFWGQGTQVTVSS

SEQ ID NO: 1055 - protein, 507 aa, synthetic construct
  source 1..507: note = HA-FBXW7a-(GS)4-BC2 peptide
MYPYDVPDYANQELLSVGSKRRRTGGSLRGNPSSSQVDEEQMNRVVEEEQQQQLRQQEEEHTARNGEVVGVEPRPGGQNDSQQGQLEENNNRFISVDEDSSGNQEEQEEDEEHAGEQDEEDEEEEEMDQESDDFDQSDDSSREDEHTHTNSVTNSSSIVDLPVHQLSSPFYTKTTKMKRKLDHGSEVRSFSLGKKPCKVSEYTSTTGLVPCSATPTTFGDLRAANGQGQQRRRITSVQPPTGLQEWLKMFQSWSGPEKLLALDELIDSCEPTQVKHMMQVIEPQFQRDFISLLPKELALYVLSFLEPKDLLQAAQTCRYWRILAEDNLLWREKCKEEGIDEPLHIKRRKVIKPGFIHSPWKSAYIRQHRIDTNSRRGGSGSGSGSQVQLVESGGGLVQPGGSLTLSCTASGFTLDHYDIGWFRQAPGKEREGVSCINNSDDDTYYADSVKGRFTIFMNNAKDTVYLQMNSLKPEDTAIYYCAEARGCKRGRYEYDFWGQGTQVTVSS

SEQ ID NO: 1056 - protein, 509 aa, synthetic construct
  source 1..509: note = HA-FBXW7a-(GS)5-BC2 peptide
MYPYDVPDYANQELLSVGSKRRRTGGSLRGNPSSSQVDEEQMNRVVEEEQQQQLRQQEEEHTARNGEVVGVEPRPGGQNDSQQGQLEENNNRFISVDEDSSGNQEEQEEDEEHAGEQDEEDEEEEEMDQESDDFDQSDDSSREDEHTHTNSVTNSSSIVDLPVHQLSSPFYTKTTKMKRKLDHGSEVRSFSLGKKPCKVSEYTSTTGLVPCSATPTTFGDLRAANGQGQQRRRITSVQPPTGLQEWLKMFQSWSGPEKLLALDELIDSCEPTQVKHMMQVIEPQFQRDFISLLPKELALYVLSFLEPKDLLQAAQTCRYWRILAEDNLLWREKCKEEGIDEPLHIKRRKVIKPGFIHSPWKSAYIRQHRIDTNSRRGGSGSGSGSGSQVQLVESGGGLVQPGGSLTLSCTASGFTLDHYDIGWFRQAPGKEREGVSCINNSDDDTYYADSVKGRFTIFMNNAKDTVYLQMNSLKPEDTAIYYCAEARGCKRGRYEYDFWGQGTQVTVSS

SEQ ID NO: 1057 - protein, 511 aa, synthetic construct
  source 1..511: note = HA-FBXW7a-(GS)6-BC2 peptide
MYPYDVPDYANQELLSVGSKRRRTGGSLRGNPSSSQVDEEQMNRVVEEEQQQQLRQQEEEHTARNGEVVGVEPRPGGQNDSQQGQLEENNNRFISVDEDSSGNQEEQEEDEEHAGEQDEEDEEEEEMDQESDDFDQSDDSSREDEHTHTNSVTNSSSIVDLPVHQLSSPFYTKTTKMKRKLDHGSEVRSFSLGKKPCKVSEYTSTTGLVPCSATPTTFGDLRAANGQGQQRRRITSVQPPTGLQEWLKMFQSWSGPEKLLALDELIDSCEPTQVKHMMQVIEPQFQRDFISLLPKELALYVLSFLEPKDLLQAAQTCRYWRILAEDNLLWREKCKEEGIDEPLHIKRRKVIKPGFIHSPWKSAYIRQHRIDTNSRRGGSGSGSGSGSGSQVQLVESGGGLVQPGGSLTLSCTASGFTLDHYDIGWFRQAPGKEREGVSCINNSDDDTYYADSVKGRFTIFMNNAKDTVYLQMNSLKPEDTAIYYCAEARGCKRGRYEYDFWGQGTQVTVSS

SEQ ID NO: 1058 - protein, 460 aa, synthetic construct
  source 1..460: note = NLS-Keap1-(GS)1-BC2 peptide
PAAKRVKLDGSGSGSQPDPRPSGAGACCRFLPLQSQCPEGAGDAVMYASTECKAEVTPSQHGNRTFSYTLEDHTKQAFGIMNELRLSQQLCDVTLQVKYQDAPAAQFMAHKVVLASSSPVFKAMFTNGLREQGMEVVSIEGIHPKVMERLIEFAYTASISMGEKCVLHVMNGAVMYQIDSVVRACSDFLVQQLDPSNAIGIANFAEQIGCVELHQRAREYIYMHFGEVAKQEEFFNLSHCQLVTLISRDDLNVRCESEVFHACINWVKYDCEQRRFYVQALLRAVRCHSLTPNFLQMQLQKCEILQSDSRCKDYLVKIFEELTLHKPTQVMPCRAPGSQVQLVESGGGLVQPGGSLTLSCTASGFTLDHYDIGWFRQAPGKEREGVSCINNSDDDTYYADSVKGRFTIFMNNAKDTVYLQMNSLKPEDTAIYYCAEARGCKRGRYEYDFWGQGTQVTVSS

SEQ ID NO: 1059 - protein, 462 aa, synthetic construct
  source 1..462: note = NLS-Keap1-(GS)2-BC2 peptide
PAAKRVKLDGSGSGSQPDPRPSGAGACCRFLPLQSQCPEGAGDAVMYASTECKAEVTPSQHGNRTFSYTLEDHTKQAFGIMNELRLSQQLCDVTLQVKYQDAPAAQFMAHKVVLASSSPVFKAMFTNGLREQGMEVVSIEGIHPKVMERLIEFAYTASISMGEKCVLHVMNGAVMYQIDSVVRACSDFLVQQLDPSNAIGIANFAEQIGCVELHQRAREYIYMHFGEVAKQEEFFNLSHCQLVTLISRDDLNVRCESEVFHACINWVKYDCEQRRFYVQALLRAVRCHSLTPNFLQMQLQKCEILQSDSRCKDYLVKIFEELTLHKPTQVMPCRAPGSGSQVQLVESGGGLVQPGGSLTLSCTASGFTLDHYDIGWFRQAPGKEREGVSCINNSDDDTYYADSVKGRFTIFMNNAKDTVYLQMNSLKPEDTAIYYCAEARGCKRGRYEYDFWGQGTQVTVSS

SEQ ID NO: 1060 - protein, 464 aa, synthetic construct
  source 1..464: note = NLS-Keap1-(GS)3-BC2 peptide
PAAKRVKLDGSGSGSQPDPRPSGAGACCRFLPLQSQCPEGAGDAVMYASTECKAEVTPSQHGNRTFSYTLEDHTKQAFGIMNELRLSQQLCDVTLQVKYQDAPAAQFMAHKVVLASSSPVFKAMFTNGLREQGMEVVSIEGIHPKVMERLIEFAYTASISMGEKCVLHVMNGAVMYQIDSVVRACSDFLVQQLDPSNAIGIANFAEQIGCVELHQRAREYIYMHFGEVAKQEEFFNLSHCQLVTLISRDDLNVRCESEVFHACINWVKYDCEQRRFYVQALLRAVRCHSLTPNFLQMQLQKCEILQSDSRCKDYLVKIFEELTLHKPTQVMPCRAPGSGSGSQVQLVESGGGLVQPGGSLTLSCTASGFTLDHYDIGWFRQAPGKEREGVSCINNSDDDTYYADSVKGRFTIFMNNAKDTVYLQMNSLKPEDTAIYYCAEARGCKRGRYEYDFWGQGTQVTVSS

SEQ ID NO: 1061 - protein, 466 aa, synthetic construct
  source 1..466: note = NLS-Keap1-(GS)4-BC2 peptide
PAAKRVKLDGSGSGSQPDPRPSGAGACCRFLPLQSQCPEGAGDAVMYASTECKAEVTPSQHGNRTFSYTLEDHTKQAFGIMNELRLSQQLCDVTLQVKYQDAPAAQFMAHKVVLASSSPVFKAMFTNGLREQGMEVVSIEGIHPKVMERLIEFAYTASISMGEKCVLHVMNGAVMYQIDSVVRACSDFLVQQLDPSNAIGIANFAEQIGCVELHQRAREYIYMHFGEVAKQEEFFNLSHCQLVTLISRDDLNVRCESEVFHACINWVKYDCEQRRFYVQALLRAVRCHSLTPNFLQMQLQKCEILQSDSRCKDYLVKIFEELTLHKPTQVMPCRAPGSGSGSGSQVQLVESGGGLVQPGGSLTLSCTASGFTLDHYDIGWFRQAPGKEREGVSCINNSDDDTYYADSVKGRFTIFMNNAKDTVYLQMNSLKPEDTAIYYCAEARGCKRGRYEYDFWGQGTQVTVSS

SEQ ID NO: 1062 - protein, 468 aa, synthetic construct
  source 1..468: note = NLS-Keap1-(GS)5-BC2 peptide
PAAKRVKLDGSGSGSQPDPRPSGAGACCRFLPLQSQCPEGAGDAVMYASTECKAEVTPSQHGNRTFSYTLEDHTKQAFGIMNELRLSQQLCDVTLQVKYQDAPAAQFMAHKVVLASSSPVFKAMFTNGLREQGMEVVSIEGIHPKVMERLIEFAYTASISMGEKCVLHVMNGAVMYQIDSVVRACSDFLVQQLDPSNAIGIANFAEQIGCVELHQRAREYIYMHFGEVAKQEEFFNLSHCQLVTLISRDDLNVRCESEVFHACINWVKYDCEQRRFYVQALLRAVRCHSLTPNFLQMQLQKCEILQSDSRCKDYLVKIFEELTLHKPTQVMPCRAPGSGSGSGSGSQVQLVESGGGLVQPGGSLTLSCTASGFTLDHYDIGWFRQAPGKEREGVSCINNSDDDTYYADSVKGRFTIFMNNAKDTVYLQMNSLKPEDTAIYYCAEARGCKRGRYEYDFWGQGTQVTVSS

SEQ ID NO: 1063 - protein, 470 aa, synthetic construct
  source 1..470: note = NLS-Keap1-(GS)6-BC2 peptide
PAAKRVKLDGSGSGSQPDPRPSGAGACCRFLPLQSQCPEGAGDAVMYASTECKAEVTPSQHGNRTFSYTLEDHTKQAFGIMNELRLSQQLCDVTLQVKYQDAPAAQFMAHKVVLASSSPVFKAMFTNGLREQGMEVVSIEGIHPKVMERLIEFAYTASISMGEKCVLHVMNGAVMYQIDSVVRACSDFLVQQLDPSNAIGIANFAEQIGCVELHQRAREYIYMHFGEVAKQEEFFNLSHCQLVTLISRDDLNVRCESEVFHACINWVKYDCEQRRFYVQALLRAVRCHSLTPNFLQMQLQKCEILQSDSRCKDYLVKIFEELTLHKPTQVMPCRAPGSGSGSGSGSGSQVQLVESGGGLVQPGGSLTLSCTASGFTLDHYDIGWFRQAPGKEREGVSCINNSDDDTYYADSVKGRFTIFMNNAKDTVYLQMNSLKPEDTAIYYCAEARGCKRGRYEYDFWGQGTQVTVSS

SEQ ID NO: 1064 - protein, 470 aa, synthetic construct
  source 1..470: note = HA-NLS-Keap1-(GS)1-BC2 peptide
MYPYDVPDYAPAAKRVKLDGSGSGSQPDPRPSGAGACCRFLPLQSQCPEGAGDAVMYASTECKAEVTPSQHGNRTFSYTLEDHTKQAFGIMNELRLSQQLCDVTLQVKYQDAPAAQFMAHKVVLASSSPVFKAMFTNGLREQGMEVVSIEGIHPKVMERLIEFAYTASISMGEKCVLHVMNGAVMYQIDSVVRACSDFLVQQLDPSNAIGIANFAEQIGCVELHQRAREYIYMHFGEVAKQEEFFNLSHCQLVTLISRDDLNVRCESEVFHACINWVKYDCEQRRFYVQALLRAVRCHSLTPNFLQMQLQKCEILQSDSRCKDYLVKIFEELTLHKPTQVMPCRAPGSQVQLVESGGGLVQPGGSLTLSCTASGFTLDHYDIGWFRQAPGKEREGVSCINNSDDDTYYADSVKGRFTIFMNNAKDTVYLQMNSLKPEDTAIYYCAEARGCKRGRYEYDFWGQGTQVTVSS

SEQ ID NO: 1065 - protein, 472 aa, synthetic construct
  source 1..472: note = HA-NLS-Keap1-(GS)2-BC2 peptide
MYPYDVPDYAPAAKRVKLDGSGSGSQPDPRPSGAGACCRFLPLQSQCPEGAGDAVMYASTECKAEVTPSQHGNRTFSYTLEDHTKQAFGIMNELRLSQQLCDVTLQVKYQDAPAAQFMAHKVVLASSSPVFKAMFTNGLREQGMEVVSIEGIHPKVMERLIEFAYTASISMGEKCVLHVMNGAVMYQIDSVVRACSDFLVQQLDPSNAIGIANFAEQIGCVELHQRAREYIYMHFGEVAKQEEFFNLSHCQLVTLISRDDLNVRCESEVFHACINWVKYDCEQRRFYVQALLRAVRCHSLTPNFLQMQLQKCEILQSDSRCKDYLVKIFEELTLHKPTQVMPCRAPGSGSQVQLVESGGGLVQPGGSLTLSCTASGFTLDHYDIGWFRQAPGKEREGVSCINNSDDDTYYADSVKGRFTIFMNNAKDTVYLQMNSLKPEDTAIYYCAEARGCKRGRYEYDFWGQGTQVTVSS

SEQ ID NO: 1066 - protein, 474 aa, synthetic construct
  source 1..474: note = HA-NLS-Keap1-(GS)3-BC2 peptide
MYPYDVPDYAPAAKRVKLDGSGSGSQPDPRPSGAGACCRFLPLQSQCPEGAGDAVMYASTECKAEVTPSQHGNRTFSYTLEDHTKQAFGIMNELRLSQQLCDVTLQVKYQDAPAAQFMAHKVVLASSSPVFKAMFTNGLREQGMEVVSIEGIHPKVMERLIEFAYTASISMGEKCVLHVMNGAVMYQIDSVVRACSDFLVQQLDPSNAIGIANFAEQIGCVELHQRAREYIYMHFGEVAKQEEFFNLSHCQLVTLISRDDLNVRCESEVFHACINWVKYDCEQRRFYVQALLRAVRCHSLTPNFLQMQLQKCEILQSDSRCKDYLVKIFEELTLHKPTQVMPCRAPGSGSGSQVQLVESGGGLVQPGGSLTLSCTASGFTLDHYDIGWFRQAPGKEREGVSCINNSDDDTYYADSVKGRFTIFMNNAKDTVYLQMNSLKPEDTAIYYCAEARGCKRGRYEYDFWGQGTQVTVSS

SEQ ID NO: 1067 - protein, 476 aa, synthetic construct
  source 1..476: note = HA-NLS-Keap1-(GS)4-BC2 peptide
MYPYDVPDYAPAAKRVKLDGSGSGSQPDPRPSGAGACCRFLPLQSQCPEGAGDAVMYASTECKAEVTPSQHGNRTFSYTLEDHTKQAFGIMNELRLSQQLCDVTLQVKYQDAPAAQFMAHKVVLASSSPVFKAMFTNGLREQGMEVVSIEGIHPKVMERLIEFAYTASISMGEKCVLHVMNGAVMYQIDSVVRACSDFLVQQLDPSNAIGIANFAEQIGCVELHQRAREYIYMHFGEVAKQEEFFNLSHCQLVTLISRDDLNVRCESEVFHACINWVKYDCEQRRFYVQALLRAVRCHSLTPNFLQMQLQKCEILQSDSRCKDYLVKIFEELTLHKPTQVMPCRAPGSGSGSGSQVQLVESGGGLVQPGGSLTLSCTASGFTLDHYDIGWFRQAPGKEREGVSCINNSDDDTYYADSVKGRFTIFMNNAKDTVYLQMNSLKPEDTAIYYCAEARGCKRGRYEYDFWGQGTQVTVSS

SEQ ID NO: 1068 - protein, 478 aa, synthetic construct
  source 1..478: note = HA-NLS-Keap1-(GS)5-BC2 peptide
MYPYDVPDYAPAAKRVKLDGSGSGSQPDPRPSGAGACCRFLPLQSQCPEGAGDAVMYASTECKAEVTPSQHGNRTFSYTLEDHTKQAFGIMNELRLSQQLCDVTLQVKYQDAPAAQFMAHKVVLASSSPVFKAMFTNGLREQGMEVVSIEGIHPKVMERLIEFAYTASISMGEKCVLHVMNGAVMYQIDSVVRACSDFLVQQLDPSNAIGIANFAEQIGCVELHQRAREYIYMHFGEVAKQEEFFNLSHCQLVTLISRDDLNVRCESEVFHACINWVKYDCEQRRFYVQALLRAVRCHSLTPNFLQMQLQKCEILQSDSRCKDYLVKIFEELTLHKPTQVMPCRAPGSGSGSGSGSQVQLVESGGGLVQPGGSLTLSCTASGFTLDHYDIGWFRQAPGKEREGVSCINNSDDDTYYADSVKGRFTIFMNNAKDTVYLQMNSLKPEDTAIYYCAEARGCKRGRYEYDFWGQGTQVTVSS

SEQ ID NO: 1069 - protein, 480 aa, synthetic construct
  source 1..480: note = HA-NLS-Keap1-(GS)6-BC2 peptide
MYPYDVPDYAPAAKRVKLDGSGSGSQPDPRPSGAGACCRFLPLQSQCPEGAGDAVMYASTECKAEVTPSQHGNRTFSYTLEDHTKQAFGIMNELRLSQQLCDVTLQVKYQDAPAAQFMAHKVVLASSSPVFKAMFTNGLREQGMEVVSIEGIHPKVMERLIEFAYTASISMGEKCVLHVMNGAVMYQIDSVVRACSDFLVQQLDPSNAIGIANFAEQIGCVELHQRAREYIYMHFGEVAKQEEFFNLSHCQLVTLISRDDLNVRCESEVFHACINWVKYDCEQRRFYVQALLRAVRCHSLTPNFLQMQLQKCEILQSDSRCKDYLVKIFEELTLHKPTQVMPCRAPGSGSGSGSGSGSQVQLVESGGGLVQPGGSLTLSCTASGFTLDHYDIGWFRQAPGKEREGVSCINNSDDDTYYADSVKGRFTIFMNNAKDTVYLQMNSLKPEDTAIYYCAEARGCKRGRYEYDFWGQGTQVTVSS

SEQ ID NO: 1070 - protein, 266 aa, synthetic construct
  source 1..266: note = NLS-RNF125-(GS)1-BC2 peptide
PAAKRVKLDGSGSGSGSVLSTDSGKSAPASATARALERRRDPELPVTSFDCAVCLEVLHQPVRTRCGHVFCRSCIATSLKNNKWTCPYCRAYLPSEGVPATDVAKRMKSEYKNCAECDTLVCLSEMRAHIRTCQKYIDKYGPGSQVQLVESGGGLVQPGGSLTLSCTASGFTLDHYDIGWFRQAPGKEREGVSCINNSDDDTYYADSVKGRFTIFMNNAKDTVYLQMNSLKPEDTAIYYCAEARGCKRGRYEYDFWGQGTQVTVSS

SEQ ID NO: 1071 - protein, 268 aa, synthetic construct
  source 1..268: note = NLS-RNF125-(GS)2-BC2 peptide
PAAKRVKLDGSGSGSGSVLSTDSGKSAPASATARALERRRDPELPVTSFDCAVCLEVLHQPVRTRCGHVFCRSCIATSLKNNKWTCPYCRAYLPSEGVPATDVAKRMKSEYKNCAECDTLVCLSEMRAHIRTCQKYIDKYGPGSGSQVQLVESGGGLVQPGGSLTLSCTASGFTLDHYDIGWFRQAPGKEREGVSCINNSDDDTYYADSVKGRFTIFMNNAKDTVYLQMNSLKPEDTAIYYCAEARGCKRGRYEYDFWGQGTQVTVSS

SEQ ID NO: 1072 - protein, 270 aa, synthetic construct
  source 1..270: note = NLS-RNF125-(GS)3-BC2 peptide
PAAKRVKLDGSGSGSGSVLSTDSGKSAPASATARALERRRDPELPVTSFDCAVCLEVLHQPVRTRCGHVFCRSCIATSLKNNKWTCPYCRAYLPSEGVPATDVAKRMKSEYKNCAECDTLVCLSEMRAHIRTCQKYIDKYGPGSGSGSQVQLVESGGGLVQPGGSLTLSCTASGFTLDHYDIGWFRQAPGKEREGVSCINNSDDDTYYADSVKGRFTIFMNNAKDTVYLQMNSLKPEDTAIYYCAEARGCKRGRYEYDFWGQGTQVTVSS

SEQ ID NO: 1073 - protein, 272 aa, synthetic construct
  source 1..272: note = NLS-RNF125-(GS)4-BC2 peptide
PAAKRVKLDGSGSGSGSVLSTDSGKSAPASATARALERRRDPELPVTSFDCAVCLEVLHQPVRTRCGHVFCRSCIATSLKNNKWTCPYCRAYLPSEGVPATDVAKRMKSEYKNCAECDTLVCLSEMRAHIRTCQKYIDKYGPGSGSGSGSQVQLVESGGGLVQPGGSLTLSCTASGFTLDHYDIGWFRQAPGKEREGVSCINNSDDDTYYADSVKGRFTIFMNNAKDTVYLQMNSLKPEDTAIYYCAEARGCKRGRYEYDFWGQGTQVTVSS

SEQ ID NO: 1074 - protein, 274 aa, synthetic construct
  source 1..274: note = NLS-RNF125-(GS)5-BC2 peptide
PAAKRVKLDGSGSGSGSVLSTDSGKSAPASATARALERRRDPELPVTSFDCAVCLEVLHQPVRTRCGHVFCRSCIATSLKNNKWTCPYCRAYLPSEGVPATDVAKRMKSEYKNCAECDTLVCLSEMRAHIRTCQKYIDKYGPGSGSGSGSGSQVQLVESGGGLVQPGGSLTLSCTASGFTLDHYDIGWFRQAPGKEREGVSCINNSDDDTYYADSVKGRFTIFMNNAKDTVYLQMNSLKPEDTAIYYCAEARGCKRGRYEYDFWGQGTQVTVSS

SEQ ID NO: 1075 - protein, 276 aa, synthetic construct
  source 1..276: note = NLS-RNF125-(GS)6-BC2 peptide
PAAKRVKLDGSGSGSGSVLSTDSGKSAPASATARALERRRDPELPVTSFDCAVCLEVLHQPVRTRCGHVFCRSCIATSLKNNKWTCPYCRAYLPSEGVPATDVAKRMKSEYKNCAECDTLVCLSEMRAHIRTCQKYIDKYGPGSGSGSGSGSGSQVQLVESGGGLVQPGGSLTLSCTASGFTLDHYDIGWFRQAPGKEREGVSCINNSDDDTYYADSVKGRFTIFMNNAKDTVYLQMNSLKPEDTAIYYCAEARGCKRGRYEYDFWGQGTQVTVSS

SEQ ID NO: 1076 - protein, 276 aa, synthetic construct
  source 1..276: note = HA-NLS-RNF125-(GS)1-BC2 peptide
MYPYDVPDYAPAAKRVKLDGSGSGSGSVLSTDSGKSAPASATARALERRRDPELPVTSFDCAVCLEVLHQPVRTRCGHVFCRSCIATSLKNNKWTCPYCRAYLPSEGVPATDVAKRMKSEYKNCAECDTLVCLSEMRAHIRTCQKYIDKYGPGSQVQLVESGGGLVQPGGSLTLSCTASGFTLDHYDIGWFRQAPGKEREGVSCINNSDDDTYYADSVKGRFTIFMNNAKDTVYLQMNSLKPEDTAIYYCAEARGCKRGRYEYDFWGQGTQVTVSS

SEQ ID NO: 1077 - protein, 278 aa, synthetic construct
  source 1..278: note = HA-NLS-RNF125-(GS)2-BC2 peptide
MYPYDVPDYAPAAKRVKLDGSGSGSGSVLSTDSGKSAPASATARALERRRDPELPVTSFDCAVCLEVLHQPVRTRCGHVFCRSCIATSLKNNKWTCPYCRAYLPSEGVPATDVAKRMKSEYKNCAECDTLVCLSEMRAHIRTCQKYIDKYGPGSGSQVQLVESGGGLVQPGGSLTLSCTASGFTLDHYDIGWFRQAPGKEREGVSCINNSDDDTYYADSVKGRFTIFMNNAKDTVYLQMNSLKPEDTAIYYCAEARGCKRGRYEYDFWGQGTQVTVSS

SEQ ID NO: 1078 - protein, 280 aa, synthetic construct
  source 1..280: note = HA-NLS-RNF125-(GS)3-BC2 peptide
MYPYDVPDYAPAAKRVKLDGSGSGSGSVLSTDSGKSAPASATARALERRRDPELPVTSFDCAVCLEVLHQPVRTRCGHVFCRSCIATSLKNNKWTCPYCRAYLPSEGVPATDVAKRMKSEYKNCAECDTLVCLSEMRAHIRTCQKYIDKYGPGSGSGSQVQLVESGGGLVQPGGSLTLSCTASGFTLDHYDIGWFRQAPGKEREGVSCINNSDDDTYYADSVKGRFTIFMNNAKDTVYLQMNSLKPEDTAIYYCAEARGCKRGRYEYDFWGQGTQVTVSS

SEQ ID NO: 1079 - protein, 282 aa, synthetic construct
  source 1..282: note = HA-NLS-RNF125-(GS)4-BC2 peptide
MYPYDVPDYAPAAKRVKLDGSGSGSGSVLSTDSGKSAPASATARALERRRDPELPVTSFDCAVCLEVLHQPVRTRCGHVFCRSCIATSLKNNKWTCPYCRAYLPSEGVPATDVAKRMKSEYKNCAECDTLVCLSEMRAHIRTCQKYIDKYGPGSGSGSGSQVQLVESGGGLVQPGGSLTLSCTASGFTLDHYDIGWFRQAPGKEREGVSCINNSDDDTYYADSVKGRFTIFMNNAKDTVYLQMNSLKPEDTAIYYCAEARGCKRGRYEYDFWGQGTQVTVSS

SEQ ID NO: 1080 - protein, 284 aa, synthetic construct
  source 1..284: note = HA-NLS-RNF125-(GS)5-BC2 peptide
MYPYDVPDYAPAAKRVKLDGSGSGSGSVLSTDSGKSAPASATARALERRRDPELPVTSFDCAVCLEVLHQPVRTRCGHVFCRSCIATSLKNNKWTCPYCRAYLPSEGVPATDVAKRMKSEYKNCAECDTLVCLSEMRAHIRTCQKYIDKYGPGSGSGSGSGSQVQLVESGGGLVQPGGSLTLSCTASGFTLDHYDIGWFRQAPGKEREGVSCINNSDDDTYYADSVKGRFTIFMNNAKDTVYLQMNSLKPEDTAIYYCAEARGCKRGRYEYDFWGQGTQVTVSS

SEQ ID NO: 1081 - protein, 286 aa, synthetic construct
  source 1..286: note = HA-NLS-RNF125-(GS)6-BC2 peptide
MYPYDVPDYAPAAKRVKLDGSGSGSGSVLSTDSGKSAPASATARALERRRDPELPVTSFDCAVCLEVLHQPVRTRCGHVFCRSCIATSLKNNKWTCPYCRAYLPSEGVPATDVAKRMKSEYKNCAECDTLVCLSEMRAHIRTCQKYIDKYGPGSGSGSGSGSGSQVQLVESGGGLVQPGGSLTLSCTASGFTLDHYDIGWFRQAPGKEREGVSCINNSDDDTYYADSVKGRFTIFMNNAKDTVYLQMNSLKPEDTAIYYCAEARGCKRGRYEYDFWGQGTQVTVSS

SEQ ID NO: 1082 - protein, 366 aa, synthetic construct
  source 1..366: note = BC2-(GS)1-SPOP-NLS peptide
MQVQLVESGGGLVQPGGSLTLSCTASGFTLDHYDIGWFRQAPGKEREGVSCINNSDDDTYYADSVKGRFTIFMNNAKDTVYLQMNSLKPEDTAIYYCAEARGCKRGRYEYDFWGQGTQVTVSSGSNGLLPDDKLTLFCEVSVVQDSVNISGQNTMNMVKVPECRLADELGGLWENSRFTDCCLCVAGQEFQAHKAILAARSPVFSAMFEHEMEESKKNRVEINDVEPEVFKEMMCFIYTGKAPNLDKMADDLLAAADKYALERLKVMCEDALCSNLSVENAAEILILADLHSADQLKTQAVDFINYHASDVLETSGWKSMVVSHPHLVAEAYRSLASAQCPFLGPPRKRLKQSGSGSPAAKRVKLD

SEQ ID NO: 1083 - protein, 368 aa, synthetic construct
  source 1..368: note = BC2-(GS)2-SPOP-NLS peptide
MQVQLVESGGGLVQPGGSLTLSCTASGFTLDHYDIGWFRQAPGKEREGVSCINNSDDDTYYADSVKGRFTIFMNNAKDTVYLQMNSLKPEDTAIYYCAEARGCKRGRYEYDFWGQGTQVTVSSGSGSNGLLPDDKLTLFCEVSVVQDSVNISGQNTMNMVKVPECRLADELGGLWENSRFTDCCLCVAGQEFQAHKAILAARSPVFSAMFEHEMEESKKNRVEINDVEPEVFKEMMCFIYTGKAPNLDKMADDLLAAADKYALERLKVMCEDALCSNLSVENAAEILILADLHSADQLKTQAVDFINYHASDVLETSGWKSMVVSHPHLVAEAYRSLASAQCPFLGPPRKRLKQSGSGSPAAKRVKLD

SEQ ID NO: 1084 - protein, 370 aa, synthetic construct
  source 1..370: note = BC2-(GS)3-SPOP-NLS peptide
MQVQLVESGGGLVQPGGSLTLSCTASGFTLDHYDIGWFRQAPGKEREGVSCINNSDDDTYYADSVKGRFTIFMNNAKDTVYLQMNSLKPEDTAIYYCAEARGCKRGRYEYDFWGQGTQVTVSSGSGSGSNGLLPDDKLTLFCEVSVVQDSVNISGQNTMNMVKVPECRLADELGGLWENSRFTDCCLCVAGQEFQAHKAILAARSPVFSAMFEHEMEESKKNRVEINDVEPEVFKEMMCFIYTGKAPNLDKMADDLLAAADKYALERLKVMCEDALCSNLSVENAAEILILADLHSADQLKTQAVDFINYHASDVLETSGWKSMVVSHPHLVAEAYRSLASAQCPFLGPPRKRLKQSGSGSPAAKRVKLD

SEQ ID NO: 1085 - protein, 372 aa, synthetic construct
  source 1..372: note = BC2-(GS)4-SPOP-NLS peptide
MQVQLVESGGGLVQPGGSLTLSCTASGFTLDHYDIGWFRQAPGKEREGVSCINNSDDDTYYADSVKGRFTIFMNNAKDTVYLQMNSLKPEDTAIYYCAEARGCKRGRYEYDFWGQGTQVTVSSGSGSGSGSNGLLPDDKLTLFCEVSVVQDSVNISGQNTMNMVKVPECRLADELGGLWENSRFTDCCLCVAGQEFQAHKAILAARSPVFSAMFEHEMEESKKNRVEINDVEPEVFKEMMCFIYTGKAPNLDKMADDLLAAADKYALERLKVMCEDALCSNLSVENAAEILILADLHSADQLKTQAVDFINYHASDVLETSGWKSMVVSHPHLVAEAYRSLASAQCPFLGPPRKRLKQSGSGSPAAKRVKLD

SEQ ID NO: 1086 - protein, 375 aa, synthetic construct
  source 1..375: note = BC2-(GS)5-SPOP-NLS peptide
MQVQLVESGGGLVQPGGSLTLSCTASGFTLDHYDIGWFRQAPGKEREGVSCINNSDDDTYYADSVKGRFTIFMNNAKDTVYLQMNSLKPEDTAIYYCAEARGCKRGRYEYDFWGQGTQVTVSSGSGSGSGSGSNGLLPDDKLTLFCEVSVVQDSVNISGQNTMNMVKVPECRLADELGGLWENSRFTDCCLCVAGQEFQAHKAILAARSPVFSAMFEHEMEESKKNRVEINDVEPEVFKEMMCFIYTGKAPNLDKMADDLLAAADKYALERLKVMCEDALCSNLSVENAAEILILADLHSADQLKTQAVDFINYHASDVLETSGWKSMVVSHPHLVAEAYRSLASAQCPFLGPPRKRLKQSGSGSPAAKRVKLDA

SEQ ID NO: 1087 - protein, 376 aa, synthetic construct
  source 1..376: note = BC2-(GS)6-SPOP-NLS peptide
MQVQLVESGGGLVQPGGSLTLSCTASGFTLDHYDIGWFRQAPGKEREGVSCINNSDDDTYYADSVKGRFTIFMNNAKDTVYLQMNSLKPEDTAIYYCAEARGCKRGRYEYDFWGQGTQVTVSSGSGSGSGSGSGSNGLLPDDKLTLFCEVSVVQDSVNISGQNTMNMVKVPECRLADELGGLWENSRFTDCCLCVAGQEFQAHKAILAARSPVFSAMFEHEMEESKKNRVEINDVEPEVFKEMMCFIYTGKAPNLDKMADDLLAAADKYALERLKVMCEDALCSNLSVENAAEILILADLHSADQLKTQAVDFINYHASDVLETSGWKSMVVSHPHLVAEAYRSLASAQCPFLGPPRKRLKQSGSGSPAAKRVKLD

SEQ ID NO: 1088 - protein, 375 aa, synthetic construct
  source 1..375: note = BC2-(GS)1-SPOP-NLS-HA peptide
MQVQLVESGGGLVQPGGSLTLSCTASGFTLDHYDIGWFRQAPGKEREGVSCINNSDDDTYYADSVKGRFTIFMNNAKDTVYLQMNSLKPEDTAIYYCAEARGCKRGRYEYDFWGQGTQVTVSSGSNGLLPDDKLTLFCEVSVVQDSVNISGQNTMNMVKVPECRLADELGGLWENSRFTDCCLCVAGQEFQAHKAILAARSPVFSAMFEHEMEESKKNRVEINDVEPEVFKEMMCFIYTGKAPNLDKMADDLLAAADKYALERLKVMCEDALCSNLSVENAAEILILADLHSADQLKTQAVDFINYHASDVLETSGWKSMVVSHPHLVAEAYRSLASAQCPFLGPPRKRLKQSGSGSPAAKRVKLDYPYDVPDYA

SEQ ID NO: 1089 - protein, 377 aa, synthetic construct
  source 1..377: note = BC2-(GS)2-SPOP-NLS-HA peptide
MQVQLVESGGGLVQPGGSLTLSCTASGFTLDHYDIGWFRQAPGKEREGVSCINNSDDDTYYADSVKGRFTIFMNNAKDTVYLQMNSLKPEDTAIYYCAEARGCKRGRYEYDFWGQGTQVTVSSGSGSNGLLPDDKLTLFCEVSVVQDSVNISGQNTMNMVKVPECRLADELGGLWENSRFTDCCLCVAGQEFQAHKAILAARSPVFSAMFEHEMEESKKNRVEINDVEPEVFKEMMCFIYTGKAPNLDKMADDLLAAADKYALERLKVMCEDALCSNLSVENAAEILILADLHSADQLKTQAVDFINYHASDVLETSGWKSMVVSHPHLVAEAYRSLASAQCPFLGPPRKRLKQSGSGSPAAKRVKLDYPYDVPDYA

SEQ ID NO: 1090 - protein, 379 aa, synthetic construct
  source 1..379: note = BC2-(GS)3-SPOP-NLS-HA peptide
MQVQLVESGGGLVQPGGSLTLSCTASGFTLDHYDIGWFRQAPGKEREGVSCINNSDDDTYYADSVKGRFTIFMNNAKDTVYLQMNSLKPEDTAIYYCAEARGCKRGRYEYDFWGQGTQVTVSSGSGSGSNGLLPDDKLTLFCEVSVVQDSVNISGQNTMNMVKVPECRLADELGGLWENSRFTDCCLCVAGQEFQAHKAILAARSPVFSAMFEHEMEESKKNRVEINDVEPEVFKEMMCFIYTGKAPNLDKMADDLLAAADKYALERLKVMCEDALCSNLSVENAAEILILADLHSADQLKTQAVDFINYHASDVLETSGWKSMVVSHPHLVAEAYRSLASAQCPFLGPPRKRLKQSGSGSPAAKRVKLDYPYDVPDYA

SEQ ID NO: 1091 - protein, 381 aa, synthetic construct
  source 1..381: note = BC2-(GS)4-SPOP-NLS-HA peptide
MQVQLVESGGGLVQPGGSLTLSCTASGFTLDHYDIGWFRQAPGKEREGVSCINNSDDDTYYADSVKGRFTIFMNNAKDTVYLQMNSLKPEDTAIYYCAEARGCKRGRYEYDFWGQGTQVTVSSGSGSGSGSNGLLPDDKLTLFCEVSVVQDSVNISGQNTMNMVKVPECRLADELGGLWENSRFTDCCLCVAGQEFQAHKAILAARSPVFSAMFEHEMEESKKNRVEINDVEPEVFKEMMCFIYTGKAPNLDKMADDLLAAADKYALERLKVMCEDALCSNLSVENAAEILILADLHSADQLKTQAVDFINYHASDVLETSGWKSMVVSHPHLVAEAYRSLASAQCPFLGPPRKRLKQSGSGSPAAKRVKLDYPYDVPDYA

SEQ ID NO: 1092 - protein, 384 aa, synthetic construct
  source 1..384: note = BC2-(GS)5-SPOP-NLS-HA peptide
MQVQLVESGGGLVQPGGSLTLSCTASGFTLDHYDIGWFRQAPGKEREGVSCINNSDDDTYYADSVKGRFTIFMNNAKDTVYLQMNSLKPEDTAIYYCAEARGCKRGRYEYDFWGQGTQVTVSSGSGSGSGSGSNGLLPDDKLTLFCEVSVVQDSVNISGQNTMNMVKVPECRLADELGGLWENSRFTDCCLCVAGQEFQAHKAILAARSPVFSAMFEHEMEESKKNRVEINDVEPEVFKEMMCFIYTGKAPNLDKMADDLLAAADKYALERLKVMCEDALCSNLSVENAAEILILADLHSADQLKTQAVDFINYHASDVLETSGWKSMVVSHPHLVAEAYRSLASAQCPFLGPPRKRLKQSGSGSPAAKRVKLDYPYDVPDYAA

SEQ ID NO: 1093 - protein, 385 aa, synthetic construct
  source 1..385: note = BC2-(GS)6-SPOP-NLS-HA peptide
MQVQLVESGGGLVQPGGSLTLSCTASGFTLDHYDIGWFRQAPGKEREGVSCINNSDDDTYYADSVKGRFTIFMNNAKDTVYLQMNSLKPEDTAIYYCAEARGCKRGRYEYDFWGQGTQVTVSSGSGSGSGSGSGSNGLLPDDKLTLFCEVSVVQDSVNISGQNTMNMVKVPECRLADELGGLWENSRFTDCCLCVAGQEFQAHKAILAARSPVFSAMFEHEMEESKKNRVEINDVEPEVFKEMMCFIYTGKAPNLDKMADDLLAAADKYALERLKVMCEDALCSNLSVENAAEILILADLHSADQLKTQAVDFINYHASDVLETSGWKSMVVSHPHLVAEAYRSLASAQCPFLGPPRKRLKQSGSGSPAAKRVKLDYPYDVPDYA

SEQ ID NO: 1094 - protein, 305 aa, synthetic construct
  source 1..305: note = BC2-(GS)1-CHIP peptide
MQVQLVESGGGLVQPGGSLTLSCTASGFTLDHYDIGWFRQAPGKEREGVSCINNSDDDTYYADSVKGRFTIFMNNAKDTVYLQMNSLKPEDTAIYYCAEARGCKRGRYEYDFWGQGTQVTVSSGSRLNFGDDIPSALRIAKKKRWNSIEERRIHQESELHSYLSRLIAAERERELEECQRNHEGDEDDSHVRAQQACIEAKHDKYMADMDELFSQVDEKRKKRDIPDYLCGKISFELMREPCITPSGITYDRKDIEEHLQRVGHFDPVTRSPLTQEQLIPNLAMKEVIDAFISENGWVEDYGSGS

SEQ ID NO: 1095 - protein, 307 aa, synthetic construct
  source 1..307: note = BC2-(GS)2-CHIP peptide
MQVQLVESGGGLVQPGGSLTLSCTASGFTLDHYDIGWFRQAPGKEREGVSCINNSDDDTYYADSVKGRFTIFMNNAKDTVYLQMNSLKPEDTAIYYCAEARGCKRGRYEYDFWGQGTQVTVSSGSGSRLNFGDDIPSALRIAKKKRWNSIEERRIHQESELHSYLSRLIAAERERELEECQRNHEGDEDDSHVRAQQACIEAKHDKYMADMDELFSQVDEKRKKRDIPDYLCGKISFELMREPCITPSGITYDRKDIEEHLQRVGHFDPVTRSPLTQEQLIPNLAMKEVIDAFISENGWVEDYGSGS

SEQ ID NO: 1096 - protein, 309 aa, synthetic construct
  source 1..309: note = BC2-(GS)3-CHIP peptide
MQVQLVESGGGLVQPGGSLTLSCTASGFTLDHYDIGWFRQAPGKEREGVSCINNSDDDTYYADSVKGRFTIFMNNAKDTVYLQMNSLKPEDTAIYYCAEARGCKRGRYEYDFWGQGTQVTVSSGSGSGSRLNFGDDIPSALRIAKKKRWNSIEERRIHQESELHSYLSRLIAAERERELEECQRNHEGDEDDSHVRAQQACIEAKHDKYMADMDELFSQVDEKRKKRDIPDYLCGKISFELMREPCITPSGITYDRKDIEEHLQRVGHFDPVTRSPLTQEQLIPNLAMKEVIDAFISENGWVEDYGSGS

SEQ ID NO: 1097 - protein, 311 aa, synthetic construct
  source 1..311: note = BC2-(GS)4-CHIP peptide
MQVQLVESGGGLVQPGGSLTLSCTASGFTLDHYDIGWFRQAPGKEREGVSCINNSDDDTYYADSVKGRFTIFMNNAKDTVYLQMNSLKPEDTAIYYCAEARGCKRGRYEYDFWGQGTQVTVSSGSGSGSGSRLNFGDDIPSALRIAKKKRWNSIEERRIHQESELHSYLSRLIAAERERELEECQRNHEGDEDDSHVRAQQACIEAKHDKYMADMDELFSQVDEKRKKRDIPDYLCGKISFELMREPCITPSGITYDRKDIEEHLQRVGHFDPVTRSPLTQEQLIPNLAMKEVIDAFISENGWVEDYGSGS

SEQ ID NO: 1098 - protein, 313 aa, synthetic construct
  source 1..313: note = BC2-(GS)5-CHIP peptide
MQVQLVESGGGLVQPGGSLTLSCTASGFTLDHYDIGWFRQAPGKEREGVSCINNSDDDTYYADSVKGRFTIFMNNAKDTVYLQMNSLKPEDTAIYYCAEARGCKRGRYEYDFWGQGTQVTVSSGSGSGSGSGSRLNFGDDIPSALRIAKKKRWNSIEERRIHQESELHSYLSRLIAAERERELEECQRNHEGDEDDSHVRAQQACIEAKHDKYMADMDELFSQVDEKRKKRDIPDYLCGKISFELMREPCITPSGITYDRKDIEEHLQRVGHFDPVTRSPLTQEQLIPNLAMKEVIDAFISENGWVEDYGSGS

SEQ ID NO: 1099 - protein, 315 aa, synthetic construct
  source 1..315: note = BC2-(GS)6-CHIP peptide
MQVQLVESGGGLVQPGGSLTLSCTASGFTLDHYDIGWFRQAPGKEREGVSCINNSDDDTYYADSVKGRFTIFMNNAKDTVYLQMNSLKPEDTAIYYCAEARGCKRGRYEYDFWGQGTQVTVSSGSGSGSGSGSGSRLNFGDDIPSALRIAKKKRWNSIEERRIHQESELHSYLSRLIAAERERELEECQRNHEGDEDDSHVRAQQACIEAKHDKYMADMDELFSQVDEKRKKRDIPDYLCGKISFELMREPCITPSGITYDRKDIEEHLQRVGHFDPVTRSPLTQEQLIPNLAMKEVIDAFISENGWVEDYGSGS

SEQ ID NO: 1100 - protein, 314 aa, synthetic construct
  source 1..314: note = BC2-(GS)1-CHIP-HA peptide
MQVQLVESGGGLVQPGGSLTLSCTASGFTLDHYDIGWFRQAPGKEREGVSCINNSDDDTYYADSVKGRFTIFMNNAKDTVYLQMNSLKPEDTAIYYCAEARGCKRGRYEYDFWGQGTQVTVSSGSRLNFGDDIPSALRIAKKKRWNSIEERRIHQESELHSYLSRLIAAERERELEECQRNHEGDEDDSHVRAQQACIEAKHDKYMADMDELFSQVDEKRKKRDIPDYLCGKISFELMREPCITPSGITYDRKDIEEHLQRVGHFDPVTRSPLTQEQLIPNLAMKEVIDAFISENGWVEDYGSGSYPYDVPDYA

SEQ ID NO: 1101 - protein, 316 aa, synthetic construct
  source 1..316: note = BC2-(GS)2-CHIP-HA peptide
MQVQLVESGGGLVQPGGSLTLSCTASGFTLDHYDIGWFRQAPGKEREGVSCINNSDDDTYYADSVKGRFTIFMNNAKDTVYLQMNSLKPEDTAIYYCAEARGCKRGRYEYDFWGQGTQVTVSSGSGSRLNFGDDIPSALRIAKKKRWNSIEERRIHQESELHSYLSRLIAAERERELEECQRNHEGDEDDSHVRAQQACIEAKHDKYMADMDELFSQVDEKRKKRDIPDYLCGKISFELMREPCITPSGITYDRKDIEEHLQRVGHFDPVTRSPLTQEQLIPNLAMKEVIDAFISENGWVEDYGSGSYPYDVPDYA

SEQ ID NO: 1102 - protein, 318 aa, synthetic construct
  source 1..318: note = BC2-(GS)3-CHIP-HA peptide
MQVQLVESGGGLVQPGGSLTLSCTASGFTLDHYDIGWFRQAPGKEREGVSCINNSDDDTYYADSVKGRFTIFMNNAKDTVYLQMNSLKPEDTAIYYCAEARGCKRGRYEYDFWGQGTQVTVSSGSGSGSRLNFGDDIPSALRIAKKKRWNSIEERRIHQESELHSYLSRLIAAERERELEECQRNHEGDEDDSHVRAQQACIEAKHDKYMADMDELFSQVDEKRKKRDIPDYLCGKISFELMREPCITPSGITYDRKDIEEHLQRVGHFDPVTRSPLTQEQLIPNLAMKEVIDAFISENGWVEDYGSGSYPYDVPDYA

SEQ ID NO: 1103 - protein, 320 aa, synthetic construct
  source 1..320: note = BC2-(GS)4-CHIP-HA peptide
MQVQLVESGGGLVQPGGSLTLSCTASGFTLDHYDIGWFRQAPGKEREGVSCINNSDDDTYYADSVKGRFTIFMNNAKDTVYLQMNSLKPEDTAIYYCAEARGCKRGRYEYDFWGQGTQVTVSSGSGSGSGSRLNFGDDIPSALRIAKKKRWNSIEERRIHQESELHSYLSRLIAAERERELEECQRNHEGDEDDSHVRAQQACIEAKHDKYMADMDELFSQVDEKRKKRDIPDYLCGKISFELMREPCITPSGITYDRKDIEEHLQRVGHFDPVTRSPLTQEQLIPNLAMKEVIDAFISENGWVEDYGSGSYPYDVPDYA

SEQ ID NO: 1104 - protein, 322 aa, synthetic construct
  source 1..322: note = BC2-(GS)5-CHIP-HA peptide
MQVQLVESGGGLVQPGGSLTLSCTASGFTLDHYDIGWFRQAPGKEREGVSCINNSDDDTYYADSVKGRFTIFMNNAKDTVYLQMNSLKPEDTAIYYCAEARGCKRGRYEYDFWGQGTQVTVSSGSGSGSGSGSRLNFGDDIPSALRIAKKKRWNSIEERRIHQESELHSYLSRLIAAERERELEECQRNHEGDEDDSHVRAQQACIEAKHDKYMADMDELFSQVDEKRKKRDIPDYLCGKISFELMREPCITPSGITYDRKDIEEHLQRVGHFDPVTRSPLTQEQLIPNLAMKEVIDAFISENGWVEDYGSGSYPYDVPDYA

SEQ ID NO: 1105 - protein, 324 aa, synthetic construct
  source 1..324: note = BC2-(GS)6-CHIP-HA peptide
MQVQLVESGGGLVQPGGSLTLSCTASGFTLDHYDIGWFRQAPGKEREGVSCINNSDDDTYYADSVKGRFTIFMNNAKDTVYLQMNSLKPEDTAIYYCAEARGCKRGRYEYDFWGQGTQVTVSSGSGSGSGSGSGSRLNFGDDIPSALRIAKKKRWNSIEERRIHQESELHSYLSRLIAAERERELEECQRNHEGDEDDSHVRAQQACIEAKHDKYMADMDELFSQVDEKRKKRDIPDYLCGKISFELMREPCITPSGITYDRKDIEEHLQRVGHFDPVTRSPLTQEQLIPNLAMKEVIDAFISENGWVEDYGSGSYPYDVPDYA

SEQ ID NO: 1106 - protein, 159 aa, synthetic construct
  source 1..159: note = DCAF1-(GS)1-BC2 peptide
QAPINFTSRLNRRASFPKYGGVDGGCFDRHLIFSRGSQVQLVESGGGLVQPGGSLTLSCTASGFTLDHYDIGWFRQAPGKEREGVSCINNSDDDTYYADSVKGRFTIFMNNAKDTVYLQMNSLKPEDTAIYYCAEARGCKRGRYEYDFWGQGTQVTVSS

SEQ ID NO: 1107 - protein, 161 aa, synthetic construct
  source 1..161: note = DCAF1-(GS)2-BC2 peptide
QAPINFTSRLNRRASFPKYGGVDGGCFDRHLIFSRGSGSQVQLVESGGGLVQPGGSLTLSCTASGFTLDHYDIGWFRQAPGKEREGVSCINNSDDDTYYADSVKGRFTIFMNNAKDTVYLQMNSLKPEDTAIYYCAEARGCKRGRYEYDFWGQGTQVTVSS

SEQ ID NO: 1108 - protein, 163 aa, synthetic construct
  source 1..163: note = DCAF1-(GS)3-BC2 peptide
QAPINFTSRLNRRASFPKYGGVDGGCFDRHLIFSRGSGSGSQVQLVESGGGLVQPGGSLTLSCTASGFTLDHYDIGWFRQAPGKEREGVSCINNSDDDTYYADSVKGRFTIFMNNAKDTVYLQMNSLKPEDTAIYYCAEARGCKRGRYEYDFWGQGTQVTVSS

SEQ ID NO: 1109 - protein, 165 aa, synthetic construct
  source 1..165: note = DCAF1-(GS)4-BC2 peptide
QAPINFTSRLNRRASFPKYGGVDGGCFDRHLIFSRGSGSGSGSQVQLVESGGGLVQPGGSLTLSCTASGFTLDHYDIGWFRQAPGKEREGVSCINNSDDDTYYADSVKGRFTIFMNNAKDTVYLQMNSLKPEDTAIYYCAEARGCKRGRYEYDFWGQGTQVTVSS

SEQ ID NO: 1110 - protein, 167 aa, synthetic construct
  source 1..167: note = DCAF1-(GS)5-BC2 peptide
QAPINFTSRLNRRASFPKYGGVDGGCFDRHLIFSRGSGSGSGSGSQVQLVESGGGLVQPGGSLTLSCTASGFTLDHYDIGWFRQAPGKEREGVSCINNSDDDTYYADSVKGRFTIFMNNAKDTVYLQMNSLKPEDTAIYYCAEARGCKRGRYEYDFWGQGTQVTVSS

SEQ ID NO: 1111 - protein, 169 aa, synthetic construct
  source 1..169: note = DCAF1-(GS)6-BC2 peptide
QAPINFTSRLNRRASFPKYGGVDGGCFDRHLIFSRGSGSGSGSGSGSQVQLVESGGGLVQPGGSLTLSCTASGFTLDHYDIGWFRQAPGKEREGVSCINNSDDDTYYADSVKGRFTIFMNNAKDTVYLQMNSLKPEDTAIYYCAEARGCKRGRYEYDFWGQGTQVTVSS

SEQ ID NO: 1112 - protein, 175 aa, synthetic construct
  source 1..175: note = HA-DCAF1-(GS)1-BC2 peptide
MYPYDVPDYAGSGSGSQAPINFTSRLNRRASFPKYGGVDGGCFDRHLIFSRGSQVQLVESGGGLVQPGGSLTLSCTASGFTLDHYDIGWFRQAPGKEREGVSCINNSDDDTYYADSVKGRFTIFMNNAKDTVYLQMNSLKPEDTAIYYCAEARGCKRGRYEYDFWGQGTQVTVSS

SEQ ID NO: 1113 - protein, 177 aa, synthetic construct
  source 1..177: note = HA-DCAF1-(GS)2-BC2 peptide
MYPYDVPDYAGSGSGSQAPINFTSRLNRRASFPKYGGVDGGCFDRHLIFSRGSGSQVQLVESGGGLVQPGGSLTLSCTASGFTLDHYDIGWFRQAPGKEREGVSCINNSDDDTYYADSVKGRFTIFMNNAKDTVYLQMNSLKPEDTAIYYCAEARGCKRGRYEYDFWGQGTQVTVSS

SEQ ID NO: 1114 - protein, 179 aa, synthetic construct
  source 1..179: note = HA-DCAF1-(GS)3-BC2 peptide
MYPYDVPDYAGSGSGSQAPINFTSRLNRRASFPKYGGVDGGCFDRHLIFSRGSGSGSQVQLVESGGGLVQPGGSLTLSCTASGFTLDHYDIGWFRQAPGKEREGVSCINNSDDDTYYADSVKGRFTIFMNNAKDTVYLQMNSLKPEDTAIYYCAEARGCKRGRYEYDFWGQGTQVTVSS

SEQ ID NO: 1115 - protein, 181 aa, synthetic construct
  source 1..181: note = HA-DCAF1-(GS)4-BC2 peptide
MYPYDVPDYAGSGSGSQAPINFTSRLNRRASFPKYGGVDGGCFDRHLIFSRGSGSGSGSQVQLVESGGGLVQPGGSLTLSCTASGFTLDHYDIGWFRQAPGKEREGVSCINNSDDDTYYADSVKGRFTIFMNNAKDTVYLQMNSLKPEDTAIYYCAEARGCKRGRYEYDFWGQGTQVTVSS

SEQ ID NO: 1116 - protein, 183 aa, synthetic construct
  source 1..183: note = HA-DCAF1-(GS)5-BC2 peptide
MYPYDVPDYAGSGSGSQAPINFTSRLNRRASFPKYGGVDGGCFDRHLIFSRGSGSGSGSGSQVQLVESGGGLVQPGGSLTLSCTASGFTLDHYDIGWFRQAPGKEREGVSCINNSDDDTYYADSVKGRFTIFMNNAKDTVYLQMNSLKPEDTAIYYCAEARGCKRGRYEYDFWGQGTQVTVSS

SEQ ID NO: 1117 - protein, 185 aa, synthetic construct
  source 1..185: note = HA-DCAF1-(GS)6-BC2 peptide
MYPYDVPDYAGSGSGSQAPINFTSRLNRRASFPKYGGVDGGCFDRHLIFSRGSGSGSGSGSGSQVQLVESGGGLVQPGGSLTLSCTASGFTLDHYDIGWFRQAPGKEREGVSCINNSDDDTYYADSVKGRFTIFMNNAKDTVYLQMNSLKPEDTAIYYCAEARGCKRGRYEYDFWGQGTQVTVSS

SEQ ID NO: 1118 - protein, 480 aa, synthetic construct
  source 1..480: note = BC2-(GS)1-E6AP peptide
QVQLVESGGGLVQPGGSLTLSCTASGFTLDHYDIGWFRQAPGKEREGVSCINNSDDDTYYADSVKGRFTIFMNNAKDTVYLQMNSLKPEDTAIYYCAEARGCKRGRYEYDFWGQGTQVTVSSGSNPYLRLKVRRDHIIDDALVRLEMIAMENPADLKKQLYVEFEGEQGVDEGGVSKEFFQLVVEEIFNPDIGMFTYDESTKLFWFNPSSFETEGQFTLIGIVLGLAIYNNCILDVHFPMVVYRKLMGKKGTFRDLGDSHPVLYQSLKDLLEYEGNVEDDMMITFQISQTDLFGNPMMYDLKENGDKIPITNENRKEFVNLYSDYILNKSVEKQFKAFRRGFHMVTNESPLKYLFRPEEIELLICGSRNLDFQALEETTEYDGGYTRDSVLIREFWEIVHSFTDEQKRLFLQFTTGTDRAPVGGLGKLKMIIAKNGPDTERLPTSHTCFNVLLLPEYSSKEKLKERLLKAITYAKGFGML

SEQ ID NO: 1119 - protein, 482 aa, synthetic construct
  source 1..482: note = BC2-(GS)2-E6AP peptide
QVQLVESGGGLVQPGGSLTLSCTASGFTLDHYDIGWFRQAPGKEREGVSCINNSDDDTYYADSVKGRFTIFMNNAKDTVYLQMNSLKPEDTAIYYCAEARGCKRGRYEYDFWGQGTQVTVSSGSGSNPYLRLKVRRDHIIDDALVRLEMIAMENPADLKKQLYVEFEGEQGVDEGGVSKEFFQLVVEEIFNPDIGMFTYDESTKLFWFNPSSFETEGQFTLIGIVLGLAIYNNCILDVHFPMVVYRKLMGKKGTFRDLGDSHPVLYQSLKDLLEYEGNVEDDMMITFQISQTDLFGNPMMYDLKENGDKIPITNENRKEFVNLYSDYILNKSVEKQFKAFRRGFHMVTNESPLKYLFRPEEIELLICGSRNLDFQALEETTEYDGGYTRDSVLIREFWEIVHSFTDEQKRLFLQFTTGTDRAPVGGLGKLKMIIAKNGPDTERLPTSHTCFNVLLLPEYSSKEKLKERLLKAITYAKGFGML

SEQ ID NO: 1120 - protein, 484 aa, synthetic construct
  source 1..484: note = BC2-(GS)3-E6AP peptide
QVQLVESGGGLVQPGGSLTLSCTASGFTLDHYDIGWFRQAPGKEREGVSCINNSDDDTYYADSVKGRFTIFMNNAKDTVYLQMNSLKPEDTAIYYCAEARGCKRGRYEYDFWGQGTQVTVSSGSGSGSNPYLRLKVRRDHIIDDALVRLEMIAMENPADLKKQLYVEFEGEQGVDEGGVSKEFFQLVVEEIFNPDIGMFTYDESTKLFWFNPSSFETEGQFTLIGIVLGLAIYNNCILDVHFPMVVYRKLMGKKGTFRDLGDSHPVLYQSLKDLLEYEGNVEDDMMITFQISQTDLFGNPMMYDLKENGDKIPITNENRKEFVNLYSDYILNKSVEKQFKAFRRGFHMVTNESPLKYLFRPEEIELLICGSRNLDFQALEETTEYDGGYTRDSVLIREFWEIVHSFTDEQKRLFLQFTTGTDRAPVGGLGKLKMIIAKNGPDTERLPTSHTCFNVLLLPEYSSKEKLKERLLKAITYAKGFGML

SEQ ID NO: 1121 - protein, 486 aa, synthetic construct
  source 1..486: note = BC2-(GS)4-E6AP peptide
QVQLVESGGGLVQPGGSLTLSCTASGFTLDHYDIGWFRQAPGKEREGVSCINNSDDDTYYADSVKGRFTIFMNNAKDTVYLQMNSLKPEDTAIYYCAEARGCKRGRYEYDFWGQGTQVTVSSGSGSGSGSNPYLRLKVRRDHIIDDALVRLEMIAMENPADLKKQLYVEFEGEQGVDEGGVSKEFFQLVVEEIFNPDIGMFTYDESTKLFWFNPSSFETEGQFTLIGIVLGLAIYNNCILDVHFPMVVYRKLMGKKGTFRDLGDSHPVLYQSLKDLLEYEGNVEDDMMITFQISQTDLFGNPMMYDLKENGDKIPITNENRKEFVNLYSDYILNKSVEKQFKAFRRGFHMVTNESPLKYLFRPEEIELLICGSRNLDFQALEETTEYDGGYTRDSVLIREFWEIVHSFTDEQKRLFLQFTTGTDRAPVGGLGKLKMIIAKNGPDTERLPTSHTCFNVLLLPEYSSKEKLKERLLKAITYAKGFGML

SEQ ID NO: 1122 - protein, 488 aa, synthetic construct
  source 1..488: note = BC2-(GS)5-E6AP peptide
QVQLVESGGGLVQPGGSLTLSCTASGFTLDHYDIGWFRQAPGKEREGVSCINNSDDDTYYADSVKGRFTIFMNNAKDTVYLQMNSLKPEDTAIYYCAEARGCKRGRYEYDFWGQGTQVTVSSGSGSGSGSGSNPYLRLKVRRDHIIDDALVRLEMIAMENPADLKKQLYVEFEGEQGVDEGGVSKEFFQLVVEEIFNPDIGMFTYDESTKLFWFNPSSFETEGQFTLIGIVLGLAIYNNCILDVHFPMVVYRKLMGKKGTFRDLGDSHPVLYQSLKDLLEYEGNVEDDMMITFQISQTDLFGNPMMYDLKENGDKIPITNENRKEFVNLYSDYILNKSVEKQFKAFRRGFHMVTNESPLKYLFRPEEIELLICGSRNLDFQALEETTEYDGGYTRDSVLIREFWEIVHSFTDEQKRLFLQFTTGTDRAPVGGLGKLKMIIAKNGPDTERLPTSHTCFNVLLLPEYSSKEKLKERLLKAITYAKGFGML

SEQ ID NO: 1123 - protein, 490 aa, synthetic construct
  source 1..490: note = BC2-(GS)6-E6AP peptide
QVQLVESGGGLVQPGGSLTLSCTASGFTLDHYDIGWFRQAPGKEREGVSCINNSDDDTYYADSVKGRFTIFMNNAKDTVYLQMNSLKPEDTAIYYCAEARGCKRGRYEYDFWGQGTQVTVSSGSGSGSGSGSGSNPYLRLKVRRDHIIDDALVRLEMIAMENPADLKKQLYVEFEGEQGVDEGGVSKEFFQLVVEEIFNPDIGMFTYDESTKLFWFNPSSFETEGQFTLIGIVLGLAIYNNCILDVHFPMVVYRKLMGKKGTFRDLGDSHPVLYQSLKDLLEYEGNVEDDMMITFQISQTDLFGNPMMYDLKENGDKIPITNENRKEFVNLYSDYILNKSVEKQFKAFRRGFHMVTNESPLKYLFRPEEIELLICGSRNLDFQALEETTEYDGGYTRDSVLIREFWEIVHSFTDEQKRLFLQFTTGTDRAPVGGLGKLKMIIAKNGPDTERLPTSHTCFNVLLLPEYSSKEKLKERLLKAITYAKGFGML

SEQ ID NO: 1124 - protein, 496 aa, synthetic construct
  source 1..496: note = HA-BC2-(GS)1-E6AP peptide
MYPYDVPDYAGSGSGSQVQLVESGGGLVQPGGSLTLSCTASGFTLDHYDIGWFRQAPGKEREGVSCINNSDDDTYYADSVKGRFTIFMNNAKDTVYLQMNSLKPEDTAIYYCAEARGCKRGRYEYDFWGQGTQVTVSSGSNPYLRLKVRRDHIIDDALVRLEMIAMENPADLKKQLYVEFEGEQGVDEGGVSKEFFQLVVEEIFNPDIGMFTYDESTKLFWFNPSSFETEGQFTLIGIVLGLAIYNNCILDVHFPMVVYRKLMGKKGTFRDLGDSHPVLYQSLKDLLEYEGNVEDDMMITFQISQTDLFGNPMMYDLKENGDKIPITNENRKEFVNLYSDYILNKSVEKQFKAFRRGFHMVTNESPLKYLFRPEEIELLICGSRNLDFQALEETTEYDGGYTRDSVLIREFWEIVHSFTDEQKRLFLQFTTGTDRAPVGGLGKLKMIIAKNGPDTERLPTSHTCFNVLLLPEYSSKEKLKERLLKAITYAKGFGML

SEQ ID NO: 1125 - protein, 498 aa, synthetic construct
  source 1..498: note = HA-BC2-(GS)2-E6AP peptide
MYPYDVPDYAGSGSGSQVQLVESGGGLVQPGGSLTLSCTASGFTLDHYDIGWFRQAPGKEREGVSCINNSDDDTYYADSVKGRFTIFMNNAKDTVYLQMNSLKPEDTAIYYCAEARGCKRGRYEYDFWGQGTQVTVSSGSGSNPYLRLKVRRDHIIDDALVRLEMIAMENPADLKKQLYVEFEGEQGVDEGGVSKEFFQLVVEEIFNPDIGMFTYDESTKLFWFNPSSFETEGQFTLIGIVLGLAIYNNCILDVHFPMVVYRKLMGKKGTFRDLGDSHPVLYQSLKDLLEYEGNVEDDMMITFQISQTDLFGNPMMYDLKENGDKIPITNENRKEFVNLYSDYILNKSVEKQFKAFRRGFHMVTNESPLKYLFRPEEIELLICGSRNLDFQALEETTEYDGGYTRDSVLIREFWEIVHSFTDEQKRLFLQFTTGTDRAPVGGLGKLKMIIAKNGPDTERLPTSHTCFNVLLLPEYSSKEKLKERLLKAITYAKGFGML

SEQ ID NO: 1126 - protein, 500 aa, synthetic construct
  source 1..500: note = HA-BC2-(GS)3-E6AP peptide
MYPYDVPDYAGSGSGSQVQLVESGGGLVQPGGSLTLSCTASGFTLDHYDIGWFRQAPGKEREGVSCINNSDDDTYYADSVKGRFTIFMNNAKDTVYLQMNSLKPEDTAIYYCAEARGCKRGRYEYDFWGQGTQVTVSSGSGSGSNPYLRLKVRRDHIIDDALVRLEMIAMENPADLKKQLYVEFEGEQGVDEGGVSKEFFQLVVEEIFNPDIGMFTYDESTKLFWFNPSSFETEGQFTLIGIVLGLAIYNNCILDVHFPMVVYRKLMGKKGTFRDLGDSHPVLYQSLKDLLEYEGNVEDDMMITFQISQTDLFGNPMMYDLKENGDKIPITNENRKEFVNLYSDYILNKSVEKQFKAFRRGFHMVTNESPLKYLFRPEEIELLICGSRNLDFQALEETTEYDGGYTRDSVLIREFWEIVHSFTDEQKRLFLQFTTGTDRAPVGGLGKLKMIIAKNGPDTERLPTSHTCFNVLLLPEYSSKEKLKERLLKAITYAKGFGML

SEQ ID NO: 1127 - protein, 502 aa, synthetic construct
  source 1..502: note = HA-BC2-(GS)4-E6AP peptide
MYPYDVPDYAGSGSGSQVQLVESGGGLVQPGGSLTLSCTASGFTLDHYDIGWFRQAPGKEREGVSCINNSDDDTYYADSVKGRFTIFMNNAKDTVYLQMNSLKPEDTAIYYCAEARGCKRGRYEYDFWGQGTQVTVSSGSGSGSGSNPYLRLKVRRDHIIDDALVRLEMIAMENPADLKKQLYVEFEGEQGVDEGGVSKEFFQLVVEEIFNPDIGMFTYDESTKLFWFNPSSFETEGQFTLIGIVLGLAIYNNCILDVHFPMVVYRKLMGKKGTFRDLGDSHPVLYQSLKDLLEYEGNVEDDMMITFQISQTDLFGNPMMYDLKENGDKIPITNENRKEFVNLYSDYILNKSVEKQFKAFRRGFHMVTNESPLKYLFRPEEIELLICGSRNLDFQALEETTEYDGGYTRDSVLIREFWEIVHSFTDEQKRLFLQFTTGTDRAPVGGLGKLKMIIAKNGPDTERLPTSHTCFNVLLLPEYSSKEKLKERLLKAITYAKGFGML

SEQ ID NO: 1128 - protein, 504 aa, synthetic construct
  source 1..504: note = HA-BC2-(GS)5-E6AP peptide
MYPYDVPDYAGSGSGSQVQLVESGGGLVQPGGSLTLSCTASGFTLDHYDIGWFRQAPGKEREGVSCINNSDDDTYYADSVKGRFTIFMNNAKDTVYLQMNSLKPEDTAIYYCAEARGCKRGRYEYDFWGQGTQVTVSSGSGSGSGSGSNPYLRLKVRRDHIIDDALVRLEMIAMENPADLKKQLYVEFEGEQGVDEGGVSKEFFQLVVEEIFNPDIGMFTYDESTKLFWFNPSSFETEGQFTLIGIVLGLAIYNNCILDVHFPMVVYRKLMGKKGTFRDLGDSHPVLYQSLKDLLEYEGNVEDDMMITFQISQTDLFGNPMMYDLKENGDKIPITNENRKEFVNLYSDYILNKSVEKQFKAFRRGFHMVTNESPLKYLFRPEEIELLICGSRNLDFQALEETTEYDGGYTRDSVLIREFWEIVHSFTDEQKRLFLQFTTGTDRAPVGGLGKLKMIIAKNGPDTERLPTSHTCFNVLLLPEYSSKEKLKERLLKAITYAKGFGML

SEQ ID NO: 1129 - protein, 506 aa, synthetic construct
  source 1..506: note = HA-BC2-(GS)6-E6AP peptide
MYPYDVPDYAGSGSGSQVQLVESGGGLVQPGGSLTLSCTASGFTLDHYDIGWFRQAPGKEREGVSCINNSDDDTYYADSVKGRFTIFMNNAKDTVYLQMNSLKPEDTAIYYCAEARGCKRGRYEYDFWGQGTQVTVSSGSGSGSGSGSGSNPYLRLKVRRDHIIDDALVRLEMIAMENPADLKKQLYVEFEGEQGVDEGGVSKEFFQLVVEEIFNPDIGMFTYDESTKLFWFNPSSFETEGQFTLIGIVLGLAIYNNCILDVHFPMVVYRKLMGKKGTFRDLGDSHPVLYQSLKDLLEYEGNVEDDMMITFQISQTDLFGNPMMYDLKENGDKIPITNENRKEFVNLYSDYILNKSVEKQFKAFRRGFHMVTNESPLKYLFRPEEIELLICGSRNLDFQALEETTEYDGGYTRDSVLIREFWEIVHSFTDEQKRLFLQFTTGTDRAPVGGLGKLKMIIAKNGPDTERLPTSHTCFNVLLLPEYSSKEKLKERLLKAITYAKGFGML

SEQ ID NO: 1130 - protein, 410 aa, synthetic construct
  source 1..410: note = bTRCP-(GS)1-BC2 peptide
DPAEAVLQEKALKFMCSMPRSLWLGCSSLADSMPSLRCLYNPGTGALTAFQNSSEREDCNNGEPPRKIIPEKNSLRQTYNSCARLCLNQETVCLASTAMKTENCVAKTKLANGTSSMIVPKQRKLSASYEKEKELCVKYFEQWSESDQVEFVEHLISQMCHYQHGHINSYLKPMLQRDFITALPARGLDHIAENILSYLDAKSLCAAELVCKEWYRVTSDGMLWKKLIERMVRTDSLWRGLAERRGWGQYLFKNKPPDGNAPPNSFYRALYPKIIQDIETIESNSRGSQVQLVESGGGLVQPGGSLTLSCTASGFTLDHYDIGWFRQAPGKEREGVSCINNSDDDTYYADSVKGRFTIFMNNAKDTVYLQMNSLKPEDTAIYYCAEARGCKRGRYEYDFWGQGTQVTVSS

SEQ ID NO: 1131 - protein, 412 aa, synthetic construct
  source 1..412: note = bTRCP-(GS)2-BC2 peptide
DPAEAVLQEKALKFMCSMPRSLWLGCSSLADSMPSLRCLYNPGTGALTAFQNSSEREDCNNGEPPRKIIPEKNSLRQTYNSCARLCLNQETVCLASTAMKTENCVAKTKLANGTSSMIVPKQRKLSASYEKEKELCVKYFEQWSESDQVEFVEHLISQMCHYQHGHINSYLKPMLQRDFITALPARGLDHIAENILSYLDAKSLCAAELVCKEWYRVTSDGMLWKKLIERMVRTDSLWRGLAERRGWGQYLFKNKPPDGNAPPNSFYRALYPKIIQDIETIESNSRGSGSQVQLVESGGGLVQPGGSLTLSCTASGFTLDHYDIGWFRQAPGKEREGVSCINNSDDDTYYADSVKGRFTIFMNNAKDTVYLQMNSLKPEDTAIYYCAEARGCKRGRYEYDFWGQGTQVTVSS

SEQ ID NO: 1132 - protein, 414 aa, synthetic construct
  source 1..414: note = bTRCP-(GS)3-BC2 peptide
DPAEAVLQEKALKFMCSMPRSLWLGCSSLADSMPSLRCLYNPGTGALTAFQNSSEREDCNNGEPPRKIIPEKNSLRQTYNSCARLCLNQETVCLASTAMKTENCVAKTKLANGTSSMIVPKQRKLSASYEKEKELCVKYFEQWSESDQVEFVEHLISQMCHYQHGHINSYLKPMLQRDFITALPARGLDHIAENILSYLDAKSLCAAELVCKEWYRVTSDGMLWKKLIERMVRTDSLWRGLAERRGWGQYLFKNKPPDGNAPPNSFYRALYPKIIQDIETIESNSRGSGSGSQVQLVESGGGLVQPGGSLTLSCTASGFTLDHYDIGWFRQAPGKEREGVSCINNSDDDTYYADSVKGRFTIFMNNAKDTVYLQMNSLKPEDTAIYYCAEARGCKRGRYEYDFWGQGTQVTVSS

SEQ ID NO: 1133 - protein, 416 aa, synthetic construct
  source 1..416: note = bTRCP-(GS)4-BC2 peptide
DPAEAVLQEKALKFMCSMPRSLWLGCSSLADSMPSLRCLYNPGTGALTAFQNSSEREDCNNGEPPRKIIPEKNSLRQTYNSCARLCLNQETVCLASTAMKTENCVAKTKLANGTSSMIVPKQRKLSASYEKEKELCVKYFEQWSESDQVEFVEHLISQMCHYQHGHINSYLKPMLQRDFITALPARGLDHIAENILSYLDAKSLCAAELVCKEWYRVTSDGMLWKKLIERMVRTDSLWRGLAERRGWGQYLFKNKPPDGNAPPNSFYRALYPKIIQDIETIESNSRGSGSGSGSQVQLVESGGGLVQPGGSLTLSCTASGFTLDHYDIGWFRQAPGKEREGVSCINNSDDDTYYADSVKGRFTIFMNNAKDTVYLQMNSLKPEDTAIYYCAEARGCKRGRYEYDFWGQGTQVTVSS

SEQ ID NO: 1134 - protein, 418 aa, synthetic construct
  source 1..418: note = bTRCP-(GS)5-BC2 peptide
DPAEAVLQEKALKFMCSMPRSLWLGCSSLADSMPSLRCLYNPGTGALTAFQNSSEREDCNNGEPPRKIIPEKNSLRQTYNSCARLCLNQETVCLASTAMKTENCVAKTKLANGTSSMIVPKQRKLSASYEKEKELCVKYFEQWSESDQVEFVEHLISQMCHYQHGHINSYLKPMLQRDFITALPARGLDHIAENILSYLDAKSLCAAELVCKEWYRVTSDGMLWKKLIERMVRTDSLWRGLAERRGWGQYLFKNKPPDGNAPPNSFYRALYPKIIQDIETIESNSRGSGSGSGSGSQVQLVESGGGLVQPGGSLTLSCTASGFTLDHYDIGWFRQAPGKEREGVSCINNSDDDTYYADSVKGRFTIFMNNAKDTVYLQMNSLKPEDTAIYYCAEARGCKRGRYEYDFWGQGTQVTVSS

SEQ ID NO: 1135 - protein, 420 aa, synthetic construct
  source 1..420: note = bTRCP-(GS)6-BC2 peptide
DPAEAVLQEKALKFMCSMPRSLWLGCSSLADSMPSLRCLYNPGTGALTAFQNSSEREDCNNGEPPRKIIPEKNSLRQTYNSCARLCLNQETVCLASTAMKTENCVAKTKLANGTSSMIVPKQRKLSASYEKEKELCVKYFEQWSESDQVEFVEHLISQMCHYQHGHINSYLKPMLQRDFITALPARGLDHIAENILSYLDAKSLCAAELVCKEWYRVTSDGMLWKKLIERMVRTDSLWRGLAERRGWGQYLFKNKPPDGNAPPNSFYRALYPKIIQDIETIESNSRGSGSGSGSGSGSQVQLVESGGGLVQPGGSLTLSCTASGFTLDHYDIGWFRQAPGKEREGVSCINNSDDDTYYADSVKGRFTIFMNNAKDTVYLQMNSLKPEDTAIYYCAEARGCKRGRYEYDFWGQGTQVTVSS

SEQ ID NO: 1136 - protein, 420 aa, synthetic construct
  source 1..420: note = HA-bTRCP-(GS)1-BC2 peptide
MYPYDVPDYADPAEAVLQEKALKFMCSMPRSLWLGCSSLADSMPSLRCLYNPGTGALTAFQNSSEREDCNNGEPPRKIIPEKNSLRQTYNSCARLCLNQETVCLASTAMKTENCVAKTKLANGTSSMIVPKQRKLSASYEKEKELCVKYFEQWSESDQVEFVEHLISQMCHYQHGHINSYLKPMLQRDFITALPARGLDHIAENILSYLDAKSLCAAELVCKEWYRVTSDGMLWKKLIERMVRTDSLWRGLAERRGWGQYLFKNKPPDGNAPPNSFYRALYPKIIQDIETIESNSRGSQVQLVESGGGLVQPGGSLTLSCTASGFTLDHYDIGWFRQAPGKEREGVSCINNSDDDTYYADSVKGRFTIFMNNAKDTVYLQMNSLKPEDTAIYYCAEARGCKRGRYEYDFWGQGTQVTVSS

SEQ ID NO: 1137 - protein, 422 aa, synthetic construct
  source 1..422: note = HA-bTRCP-(GS)2-BC2 peptide
MYPYDVPDYADPAEAVLQEKALKFMCSMPRSLWLGCSSLADSMPSLRCLYNPGTGALTAFQNSSEREDCNNGEPPRKIIPEKNSLRQTYNSCARLCLNQETVCLASTAMKTENCVAKTKLANGTSSMIVPKQRKLSASYEKEKELCVKYFEQWSESDQVEFVEHLISQMCHYQHGHINSYLKPMLQRDFITALPARGLDHIAENILSYLDAKSLCAAELVCKEWYRVTSDGMLWKKLIERMVRTDSLWRGLAERRGWGQYLFKNKPPDGNAPPNSFYRALYPKIIQDIETIESNSRGSGSQVQLVESGGGLVQPGGSLTLSCTASGFTLDHYDIGWFRQAPGKEREGVSCINNSDDDTYYADSVKGRFTIFMNNAKDTVYLQMNSLKPEDTAIYYCAEARGCKRGRYEYDFWGQGTQVTVSS

SEQ ID NO: 1138 - protein, 424 aa, synthetic construct
  source 1..424: note = HA-bTRCP-(GS)3-BC2 peptide
MYPYDVPDYADPAEAVLQEKALKFMCSMPRSLWLGCSSLADSMPSLRCLYNPGTGALTAFQNSSEREDCNNGEPPRKIIPEKNSLRQTYNSCARLCLNQETVCLASTAMKTENCVAKTKLANGTSSMIVPKQRKLSASYEKEKELCVKYFEQWSESDQVEFVEHLISQMCHYQHGHINSYLKPMLQRDFITALPARGLDHIAENILSYLDAKSLCAAELVCKEWYRVTSDGMLWKKLIERMVRTDSLWRGLAERRGWGQYLFKNKPPDGNAPPNSFYRALYPKIIQDIETIESNSRGSGSGSQVQLVESGGGLVQPGGSLTLSCTASGFTLDHYDIGWFRQAPGKEREGVSCINNSDDDTYYADSVKGRFTIFMNNAKDTVYLQMNSLKPEDTAIYYCAEARGCKRGRYEYDFWGQGTQVTVSS

SEQ ID NO: 1139 - protein, 426 aa, synthetic construct
  source 1..426: note = HA-bTRCP-(GS)4-BC2 peptide
MYPYDVPDYADPAEAVLQEKALKFMCSMPRSLWLGCSSLADSMPSLRCLYNPGTGALTAFQNSSEREDCNNGEPPRKIIPEKNSLRQTYNSCARLCLNQETVCLASTAMKTENCVAKTKLANGTSSMIVPKQRKLSASYEKEKELCVKYFEQWSESDQVEFVEHLISQMCHYQHGHINSYLKPMLQRDFITALPARGLDHIAENILSYLDAKSLCAAELVCKEWYRVTSDGMLWKKLIERMVRTDSLWRGLAERRGWGQYLFKNKPPDGNAPPNSFYRALYPKIIQDIETIESNSRGSGSGSGSQVQLVESGGGLVQPGGSLTLSCTASGFTLDHYDIGWFRQAPGKEREGVSCINNSDDDTYYADSVKGRFTIFMNNAKDTVYLQMNSLKPEDTAIYYCAEARGCKRGRYEYDFWGQGTQVTVSS

SEQ ID NO: 1140 - protein, 428 aa, synthetic construct
  source 1..428: note = HA-bTRCP-(GS)5-BC2 peptide
MYPYDVPDYADPAEAVLQEKALKFMCSMPRSLWLGCSSLADSMPSLRCLYNPGTGALTAFQNSSEREDCNNGEPPRKIIPEKNSLRQTYNSCARLCLNQETVCLASTAMKTENCVAKTKLANGTSSMIVPKQRKLSASYEKEKELCVKYFEQWSESDQVEFVEHLISQMCHYQHGHINSYLKPMLQRDFITALPARGLDHIAENILSYLDAKSLCAAELVCKEWYRVTSDGMLWKKLIERMVRTDSLWRGLAERRGWGQYLFKNKPPDGNAPPNSFYRALYPKIIQDIETIESNSRGSGSGSGSGSQVQLVESGGGLVQPGGSLTLSCTASGFTLDHYDIGWFRQAPGKEREGVSCINNSDDDTYYADSVKGRFTIFMNNAKDTVYLQMNSLKPEDTAIYYCAEARGCKRGRYEYDFWGQGTQVTVSS

SEQ ID NO: 1141 - protein, 430 aa, synthetic construct
  source 1..430: note = HA-bTRCP-(GS)6-BC2 peptide
MYPYDVPDYADPAEAVLQEKALKFMCSMPRSLWLGCSSLADSMPSLRCLYNPGTGALTAFQNSSEREDCNNGEPPRKIIPEKNSLRQTYNSCARLCLNQETVCLASTAMKTENCVAKTKLANGTSSMIVPKQRKLSASYEKEKELCVKYFEQWSESDQVEFVEHLISQMCHYQHGHINSYLKPMLQRDFITALPARGLDHIAENILSYLDAKSLCAAELVCKEWYRVTSDGMLWKKLIERMVRTDSLWRGLAERRGWGQYLFKNKPPDGNAPPNSFYRALYPKIIQDIETIESNSRGSGSGSGSGSGSQVQLVESGGGLVQPGGSLTLSCTASGFTLDHYDIGWFRQAPGKEREGVSCINNSDDDTYYADSVKGRFTIFMNNAKDTVYLQMNSLKPEDTAIYYCAEARGCKRGRYEYDFWGQGTQVTVSS

SEQ ID NO: 1142 - protein, 445 aa, synthetic construct
  source 1..445: note = Keap1-(GS)1-BC2 peptide
QPDPRPSGAGACCRFLPLQSQCPEGAGDAVMYASTECKAEVTPSQHGNRTFSYTLEDHTKQAFGIMNELRLSQQLCDVTLQVKYQDAPAAQFMAHKVVLASSSPVFKAMFTNGLREQGMEVVSIEGIHPKVMERLIEFAYTASISMGEKCVLHVMNGAVMYQIDSVVRACSDFLVQQLDPSNAIGIANFAEQIGCVELHQRAREYIYMHFGEVAKQEEFFNLSHCQLVTLISRDDLNVRCESEVFHACINWVKYDCEQRRFYVQALLRAVRCHSLTPNFLQMQLQKCEILQSDSRCKDYLVKIFEELTLHKPTQVMPCRAPGSQVQLVESGGGLVQPGGSLTLSCTASGFTLDHYDIGWFRQAPGKEREGVSCINNSDDDTYYADSVKGRFTIFMNNAKDTVYLQMNSLKPEDTAIYYCAEARGCKRGRYEYDFWGQGTQVTVSS

SEQ ID NO: 1143 - protein, 447 aa, synthetic construct
  source 1..447: note = Keap1-(GS)2-BC2 peptide
QPDPRPSGAGACCRFLPLQSQCPEGAGDAVMYASTECKAEVTPSQHGNRTFSYTLEDHTKQAFGIMNELRLSQQLCDVTLQVKYQDAPAAQFMAHKVVLASSSPVFKAMFTNGLREQGMEVVSIEGIHPKVMERLIEFAYTASISMGEKCVLHVMNGAVMYQIDSVVRACSDFLVQQLDPSNAIGIANFAEQIGCVELHQRAREYIYMHFGEVAKQEEFFNLSHCQLVTLISRDDLNVRCESEVFHACINWVKYDCEQRRFYVQALLRAVRCHSLTPNFLQMQLQKCEILQSDSRCKDYLVKIFEELTLHKPTQVMPCRAPGSGSQVQLVESGGGLVQPGGSLTLSCTASGFTLDHYDIGWFRQAPGKEREGVSCINNSDDDTYYADSVKGRFTIFMNNAKDTVYLQMNSLKPEDTAIYYCAEARGCKRGRYEYDFWGQGTQVTVSS

SEQ ID NO: 1144 - protein, 449 aa, synthetic construct
  source 1..449: note = Keap1-(GS)3-BC2 peptide
QPDPRPSGAGACCRFLPLQSQCPEGAGDAVMYASTECKAEVTPSQHGNRTFSYTLEDHTKQAFGIMNELRLSQQLCDVTLQVKYQDAPAAQFMAHKVVLASSSPVFKAMFTNGLREQGMEVVSIEGIHPKVMERLIEFAYTASISMGEKCVLHVMNGAVMYQIDSVVRACSDFLVQQLDPSNAIGIANFAEQIGCVELHQRAREYIYMHFGEVAKQEEFFNLSHCQLVTLISRDDLNVRCESEVFHACINWVKYDCEQRRFYVQALLRAVRCHSLTPNFLQMQLQKCEILQSDSRCKDYLVKIFEELTLHKPTQVMPCRAPGSGSGSQVQLVESGGGLVQPGGSLTLSCTASGFTLDHYDIGWFRQAPGKEREGVSCINNSDDDTYYADSVKGRFTIFMNNAKDTVYLQMNSLKPEDTAIYYCAEARGCKRGRYEYDFWGQGTQVTVSS

SEQ ID NO: 1145 - protein, 451 aa, synthetic construct
  source 1..451: note = Keap1-(GS)4-BC2 peptide
QPDPRPSGAGACCRFLPLQSQCPEGAGDAVMYASTECKAEVTPSQHGNRTFSYTLEDHTKQAFGIMNELRLSQQLCDVTLQVKYQDAPAAQFMAHKVVLASSSPVFKAMFTNGLREQGMEVVSIEGIHPKVMERLIEFAYTASISMGEKCVLHVMNGAVMYQIDSVVRACSDFLVQQLDPSNAIGIANFAEQIGCVELHQRAREYIYMHFGEVAKQEEFFNLSHCQLVTLISRDDLNVRCESEVFHACINWVKYDCEQRRFYVQALLRAVRCHSLTPNFLQMQLQKCEILQSDSRCKDYLVKIFEELTLHKPTQVMPCRAPGSGSGSGSQVQLVESGGGLVQPGGSLTLSCTASGFTLDHYDIGWFRQAPGKEREGVSCINNSDDDTYYADSVKGRFTIFMNNAKDTVYLQMNSLKPEDTAIYYCAEARGCKRGRYEYDFWGQGTQVTVSS

SEQ ID NO: 1146 - protein, 453 aa, synthetic construct
  source 1..453: note = Keap1-(GS)5-BC2 peptide
QPDPRPSGAGACCRFLPLQSQCPEGAGDAVMYASTECKAEVTPSQHGNRTFSYTLEDHTKQAFGIMNELRLSQQLCDVTLQVKYQDAPAAQFMAHKVVLASSSPVFKAMFTNGLREQGMEVVSIEGIHPKVMERLIEFAYTASISMGEKCVLHVMNGAVMYQIDSVVRACSDFLVQQLDPSNAIGIANFAEQIGCVELHQRAREYIYMHFGEVAKQEEFFNLSHCQLVTLISRDDLNVRCESEVFHACINWVKYDCEQRRFYVQALLRAVRCHSLTPNFLQMQLQKCEILQSDSRCKDYLVKIFEELTLHKPTQVMPCRAPGSGSGSGSGSQVQLVESGGGLVQPGGSLTLSCTASGFTLDHYDIGWFRQAPGKEREGVSCINNSDDDTYYADSVKGRFTIFMNNAKDTVYLQMNSLKPEDTAIYYCAEARGCKRGRYEYDFWGQGTQVTVSS

SEQ ID NO: 1147 - protein, 455 aa, synthetic construct
  source 1..455: note = Keap1-(GS)6-BC2 peptide
QPDPRPSGAGACCRFLPLQSQCPEGAGDAVMYASTECKAEVTPSQHGNRTFSYTLEDHTKQAFGIMNELRLSQQLCDVTLQVKYQDAPAAQFMAHKVVLASSSPVFKAMFTNGLREQGMEVVSIEGIHPKVMERLIEFAYTASISMGEKCVLHVMNGAVMYQIDSVVRACSDFLVQQLDPSNAIGIANFAEQIGCVELHQRAREYIYMHFGEVAKQEEFFNLSHCQLVTLISRDDLNVRCESEVFHACINWVKYDCEQRRFYVQALLRAVRCHSLTPNFLQMQLQKCEILQSDSRCKDYLVKIFEELTLHKPTQVMPCRAPGSGSGSGSGSGSQVQLVESGGGLVQPGGSLTLSCTASGFTLDHYDIGWFRQAPGKEREGVSCINNSDDDTYYADSVKGRFTIFMNNAKDTVYLQMNSLKPEDTAIYYCAEARGCKRGRYEYDFWGQGTQVTVSS

SEQ ID NO: 1148 - protein, 461 aa, synthetic construct
  source 1..461: note = HA-Keap1-(GS)1-BC2 peptide
MYPYDVPDYAGSGSGSQPDPRPSGAGACCRFLPLQSQCPEGAGDAVMYASTECKAEVTPSQHGNRTFSYTLEDHTKQAFGIMNELRLSQQLCDVTLQVKYQDAPAAQFMAHKVVLASSSPVFKAMFTNGLREQGMEVVSIEGIHPKVMERLIEFAYTASISMGEKCVLHVMNGAVMYQIDSVVRACSDFLVQQLDPSNAIGIANFAEQIGCVELHQRAREYIYMHFGEVAKQEEFFNLSHCQLVTLISRDDLNVRCESEVFHACINWVKYDCEQRRFYVQALLRAVRCHSLTPNFLQMQLQKCEILQSDSRCKDYLVKIFEELTLHKPTQVMPCRAPGSQVQLVESGGGLVQPGGSLTLSCTASGFTLDHYDIGWFRQAPGKEREGVSCINNSDDDTYYADSVKGRFTIFMNNAKDTVYLQMNSLKPEDTAIYYCAEARGCKRGRYEYDFWGQGTQVTVSS

SEQ ID NO: 1149 - protein, 463 aa, synthetic construct
  source 1..463: note = HA-Keap1-(GS)2-BC2 peptide
MYPYDVPDYAGSGSGSQPDPRPSGAGACCRFLPLQSQCPEGAGDAVMYASTECKAEVTPSQHGNRTFSYTLEDHTKQAFGIMNELRLSQQLCDVTLQVKYQDAPAAQFMAHKVVLASSSPVFKAMFTNGLREQGMEVVSIEGIHPKVMERLIEFAYTASISMGEKCVLHVMNGAVMYQIDSVVRACSDFLVQQLDPSNAIGIANFAEQIGCVELHQRAREYIYMHFGEVAKQEEFFNLSHCQLVTLISRDDLNVRCESEVFHACINWVKYDCEQRRFYVQALLRAVRCHSLTPNFLQMQLQKCEILQSDSRCKDYLVKIFEELTLHKPTQVMPCRAPGSGSQVQLVESGGGLVQPGGSLTLSCTASGFTLDHYDIGWFRQAPGKEREGVSCINNSDDDTYYADSVKGRFTIFMNNAKDTVYLQMNSLKPEDTAIYYCAEARGCKRGRYEYDFWGQGTQVTVSS

SEQ ID NO: 1150 - protein, 465 aa, synthetic construct
  source 1..465: note = HA-Keap1-(GS)3-BC2 peptide
MYPYDVPDYAGSGSGSQPDPRPSGAGACCRFLPLQSQCPEGAGDAVMYASTECKAEVTPSQHGNRTFSYTLEDHTKQAFGIMNELRLSQQLCDVTLQVKYQDAPAAQFMAHKVVLASSSPVFKAMFTNGLREQGMEVVSIEGIHPKVMERLIEFAYTASISMGEKCVLHVMNGAVMYQIDSVVRACSDFLVQQLDPSNAIGIANFAEQIGCVELHQRAREYIYMHFGEVAKQEEFFNLSHCQLVTLISRDDLNVRCESEVFHACINWVKYDCEQRRFYVQALLRAVRCHSLTPNFLQMQLQKCEILQSDSRCKDYLVKIFEELTLHKPTQVMPCRAPGSGSGSQVQLVESGGGLVQPGGSLTLSCTASGFTLDHYDIGWFRQAPGKEREGVSCINNSDDDTYYADSVKGRFTIFMNNAKDTVYLQMNSLKPEDTAIYYCAEARGCKRGRYEYDFWGQGTQVTVSS

SEQ ID NO: 1151 - protein, 467 aa, synthetic construct
  source 1..467: note = HA-Keap1-(GS)4-BC2 peptide
MYPYDVPDYAGSGSGSQPDPRPSGAGACCRFLPLQSQCPEGAGDAVMYASTECKAEVTPSQHGNRTFSYTLEDHTKQAFGIMNELRLSQQLCDVTLQVKYQDAPAAQFMAHKVVLASSSPVFKAMFTNGLREQGMEVVSIEGIHPKVMERLIEFAYTASISMGEKCVLHVMNGAVMYQIDSVVRACSDFLVQQLDPSNAIGIANFAEQIGCVELHQRAREYIYMHFGEVAKQEEFFNLSHCQLVTLISRDDLNVRCESEVFHACINWVKYDCEQRRFYVQALLRAVRCHSLTPNFLQMQLQKCEILQSDSRCKDYLVKIFEELTLHKPTQVMPCRAPGSGSGSGSQVQLVESGGGLVQPGGSLTLSCTASGFTLDHYDIGWFRQAPGKEREGVSCINNSDDDTYYADSVKGRFTIFMNNAKDTVYLQMNSLKPEDTAIYYCAEARGCKRGRYEYDFWGQGTQVTVSS

SEQ ID NO: 1152 - protein, 469 aa, synthetic construct
  source 1..469: note = HA-Keap1-(GS)5-BC2 peptide
MYPYDVPDYAGSGSGSQPDPRPSGAGACCRFLPLQSQCPEGAGDAVMYASTECKAEVTPSQHGNRTFSYTLEDHTKQAFGIMNELRLSQQLCDVTLQVKYQDAPAAQFMAHKVVLASSSPVFKAMFTNGLREQGMEVVSIEGIHPKVMERLIEFAYTASISMGEKCVLHVMNGAVMYQIDSVVRACSDFLVQQLDPSNAIGIANFAEQIGCVELHQRAREYIYMHFGEVAKQEEFFNLSHCQLVTLISRDDLNVRCESEVFHACINWVKYDCEQRRFYVQALLRAVRCHSLTPNFLQMQLQKCEILQSDSRCKDYLVKIFEELTLHKPTQVMPCRAPGSGSGSGSGSQVQLVESGGGLVQPGGSLTLSCTASGFTLDHYDIGWFRQAPGKEREGVSCINNSDDDTYYADSVKGRFTIFMNNAKDTVYLQMNSLKPEDTAIYYCAEARGCKRGRYEYDFWGQGTQVTVSS

SEQ ID NO: 1153 - protein, 471 aa, synthetic construct
  source 1..471: note = HA-Keap1-(GS)6-BC2 peptide
MYPYDVPDYAGSGSGSQPDPRPSGAGACCRFLPLQSQCPEGAGDAVMYASTECKAEVTPSQHGNRTFSYTLEDHTKQAFGIMNELRLSQQLCDVTLQVKYQDAPAAQFMAHKVVLASSSPVFKAMFTNGLREQGMEVVSIEGIHPKVMERLIEFAYTASISMGEKCVLHVMNGAVMYQIDSVVRACSDFLVQQLDPSNAIGIANFAEQIGCVELHQRAREYIYMHFGEVAKQEEFFNLSHCQLVTLISRDDLNVRCESEVFHACINWVKYDCEQRRFYVQALLRAVRCHSLTPNFLQMQLQKCEILQSDSRCKDYLVKIFEELTLHKPTQVMPCRAPGSGSGSGSGSGSQVQLVESGGGLVQPGGSLTLSCTASGFTLDHYDIGWFRQAPGKEREGVSCINNSDDDTYYADSVKGRFTIFMNNAKDTVYLQMNSLKPEDTAIYYCAEARGCKRGRYEYDFWGQGTQVTVSS

SEQ ID NO: 1154 - protein, 251 aa, synthetic construct
  source 1..251: note = RNF125-(GS)1-BC2 peptide
GSVLSTDSGKSAPASATARALERRRDPELPVTSFDCAVCLEVLHQPVRTRCGHVFCRSCIATSLKNNKWTCPYCRAYLPSEGVPATDVAKRMKSEYKNCAECDTLVCLSEMRAHIRTCQKYIDKYGPGSQVQLVESGGGLVQPGGSLTLSCTASGFTLDHYDIGWFRQAPGKEREGVSCINNSDDDTYYADSVKGRFTIFMNNAKDTVYLQMNSLKPEDTAIYYCAEARGCKRGRYEYDFWGQGTQVTVSS

SEQ ID NO: 1155 - protein, 253 aa, synthetic construct
  source 1..253: note = RNF125-(GS)2-BC2 peptide
GSVLSTDSGKSAPASATARALERRRDPELPVTSFDCAVCLEVLHQPVRTRCGHVFCRSCIATSLKNNKWTCPYCRAYLPSEGVPATDVAKRMKSEYKNCAECDTLVCLSEMRAHIRTCQKYIDKYGPGSGSQVQLVESGGGLVQPGGSLTLSCTASGFTLDHYDIGWFRQAPGKEREGVSCINNSDDDTYYADSVKGRFTIFMNNAKDTVYLQMNSLKPEDTAIYYCAEARGCKRGRYEYDFWGQGTQVTVSS

SEQ ID NO: 1156 - protein, 255 aa, synthetic construct
  source 1..255: note = RNF125-(GS)3-BC2 peptide
GSVLSTDSGKSAPASATARALERRRDPELPVTSFDCAVCLEVLHQPVRTRCGHVFCRSCIATSLKNNKWTCPYCRAYLPSEGVPATDVAKRMKSEYKNCAECDTLVCLSEMRAHIRTCQKYIDKYGPGSGSGSQVQLVESGGGLVQPGGSLTLSCTASGFTLDHYDIGWFRQAPGKEREGVSCINNSDDDTYYADSVKGRFTIFMNNAKDTVYLQMNSLKPEDTAIYYCAEARGCKRGRYEYDFWGQGTQVTVSS

SEQ ID NO: 1157 - protein, 257 aa, synthetic construct
  source 1..257: note = RNF125-(GS)4-BC2 peptide
GSVLSTDSGKSAPASATARALERRRDPELPVTSFDCAVCLEVLHQPVRTRCGHVFCRSCIATSLKNNKWTCPYCRAYLPSEGVPATDVAKRMKSEYKNCAECDTLVCLSEMRAHIRTCQKYIDKYGPGSGSGSGSQVQLVESGGGLVQPGGSLTLSCTASGFTLDHYDIGWFRQAPGKEREGVSCINNSDDDTYYADSVKGRFTIFMNNAKDTVYLQMNSLKPEDTAIYYCAEARGCKRGRYEYDFWGQGTQVTVSS

SEQ ID NO: 1158 - protein, 259 aa, synthetic construct
  source 1..259: note = RNF125-(GS)5-BC2 peptide
GSVLSTDSGKSAPASATARALERRRDPELPVTSFDCAVCLEVLHQPVRTRCGHVFCRSCIATSLKNNKWTCPYCRAYLPSEGVPATDVAKRMKSEYKNCAECDTLVCLSEMRAHIRTCQKYIDKYGPGSGSGSGSGSQVQLVESGGGLVQPGGSLTLSCTASGFTLDHYDIGWFRQAPGKEREGVSCINNSDDDTYYADSVKGRFTIFMNNAKDTVYLQMNSLKPEDTAIYYCAEARGCKRGRYEYDFWGQGTQVTVSS

SEQ ID NO: 1159 - protein, 261 aa, synthetic construct
  source 1..261: note = RNF125-(GS)6-BC2 peptide
GSVLSTDSGKSAPASATARALERRRDPELPVTSFDCAVCLEVLHQPVRTRCGHVFCRSCIATSLKNNKWTCPYCRAYLPSEGVPATDVAKRMKSEYKNCAECDTLVCLSEMRAHIRTCQKYIDKYGPGSGSGSGSGSGSQVQLVESGGGLVQPGGSLTLSCTASGFTLDHYDIGWFRQAPGKEREGVSCINNSDDDTYYADSVKGRFTIFMNNAKDTVYLQMNSLKPEDTAIYYCAEARGCKRGRYEYDFWGQGTQVTVSS

SEQ ID NO: 1160 - protein, 267 aa, synthetic construct
  source 1..267: note = HA-RNF125-(GS)1-BC2 peptide
MYPYDVPDYAGSGSGSGSVLSTDSGKSAPASATARALERRRDPELPVTSFDCAVCLEVLHQPVRTRCGHVFCRSCIATSLKNNKWTCPYCRAYLPSEGVPATDVAKRMKSEYKNCAECDTLVCLSEMRAHIRTCQKYIDKYGPGSQVQLVESGGGLVQPGGSLTLSCTASGFTLDHYDIGWFRQAPGKEREGVSCINNSDDDTYYADSVKGRFTIFMNNAKDTVYLQMNSLKPEDTAIYYCAEARGCKRGRYEYDFWGQGTQVTVSS

SEQ ID NO: 1161 - protein, 269 aa, synthetic construct
  source 1..269: note = HA-RNF125-(GS)2-BC2 peptide
MYPYDVPDYAGSGSGSGSVLSTDSGKSAPASATARALERRRDPELPVTSFDCAVCLEVLHQPVRTRCGHVFCRSCIATSLKNNKWTCPYCRAYLPSEGVPATDVAKRMKSEYKNCAECDTLVCLSEMRAHIRTCQKYIDKYGPGSGSQVQLVESGGGLVQPGGSLTLSCTASGFTLDHYDIGWFRQAPGKEREGVSCINNSDDDTYYADSVKGRFTIFMNNAKDTVYLQMNSLKPEDTAIYYCAEARGCKRGRYEYDFWGQGTQVTVSS

SEQ ID NO: 1162 - protein, 271 aa, synthetic construct
  source 1..271: note = HA-RNF125-(GS)3-BC2 peptide
MYPYDVPDYAGSGSGSGSVLSTDSGKSAPASATARALERRRDPELPVTSFDCAVCLEVLHQPVRTRCGHVFCRSCIATSLKNNKWTCPYCRAYLPSEGVPATDVAKRMKSEYKNCAECDTLVCLSEMRAHIRTCQKYIDKYGPGSGSGSQVQLVESGGGLVQPGGSLTLSCTASGFTLDHYDIGWFRQAPGKEREGVSCINNSDDDTYYADSVKGRFTIFMNNAKDTVYLQMNSLKPEDTAIYYCAEARGCKRGRYEYDFWGQGTQVTVSS

SEQ ID NO: 1163 - protein, 273 aa, synthetic construct
  source 1..273: note = HA-RNF125-(GS)4-BC2 peptide
MYPYDVPDYAGSGSGSGSVLSTDSGKSAPASATARALERRRDPELPVTSFDCAVCLEVLHQPVRTRCGHVFCRSCIATSLKNNKWTCPYCRAYLPSEGVPATDVAKRMKSEYKNCAECDTLVCLSEMRAHIRTCQKYIDKYGPGSGSGSGSQVQLVESGGGLVQPGGSLTLSCTASGFTLDHYDIGWFRQAPGKEREGVSCINNSDDDTYYADSVKGRFTIFMNNAKDTVYLQMNSLKPEDTAIYYCAEARGCKRGRYEYDFWGQGTQVTVSS

SEQ ID NO: 1164 - protein, 275 aa, synthetic construct
  source 1..275: note = HA-RNF125-(GS)5-BC2 peptide
MYPYDVPDYAGSGSGSGSVLSTDSGKSAPASATARALERRRDPELPVTSFDCAVCLEVLHQPVRTRCGHVFCRSCIATSLKNNKWTCPYCRAYLPSEGVPATDVAKRMKSEYKNCAECDTLVCLSEMRAHIRTCQKYIDKYGPGSGSGSGSGSQVQLVESGGGLVQPGGSLTLSCTASGFTLDHYDIGWFRQAPGKEREGVSCINNSDDDTYYADSVKGRFTIFMNNAKDTVYLQMNSLKPEDTAIYYCAEARGCKRGRYEYDFWGQGTQVTVSS

SEQ ID NO: 1165 - protein, 277 aa, synthetic construct
  source 1..277: note = HA-RNF125-(GS)6-BC2 peptide
MYPYDVPDYAGSGSGSGSVLSTDSGKSAPASATARALERRRDPELPVTSFDCAVCLEVLHQPVRTRCGHVFCRSCIATSLKNNKWTCPYCRAYLPSEGVPATDVAKRMKSEYKNCAECDTLVCLSEMRAHIRTCQKYIDKYGPGSGSGSGSGSGSQVQLVESGGGLVQPGGSLTLSCTASGFTLDHYDIGWFRQAPGKEREGVSCINNSDDDTYYADSVKGRFTIFMNNAKDTVYLQMNSLKPEDTAIYYCAEARGCKRGRYEYDFWGQGTQVTVSS

SEQ ID NO: 1166 - DNA, 762 bp, synthetic construct
  source 1..762: mol_type = other DNA; note = 3DX.1 nucleic acid
gaagtgaaactggtggaaagcggcggcgatctggtgaaaccgggcggcagcctgaaactgagctgcgcggcgagcggctttacctttagccattatggcatgagctgggtgcgccagaccccggataaacgcctggaatgggtggcgaccattggcagccgcggcacctatacccattatccggatagcgtgaaaggccgctttaccattagccgcgataacgataaaaacgcgctgtatctgcagatgaacagcctgcgcaccgaagataccgcgatgtattattgcgcgcgcaaaagcgaattttattattatggcaacacctattattatagcgcgatggattattggggccagggcgcgagcgtgaccgtgagcagcggcggcggcggcagcggcggcggcgatagcggcggcggcggcagcgatattgtgctgacccagagcccggcgagcctggcggtgagcctgggccagcgcgcgaccattagctgccgcgcgagcgaaagcgtggataactatggctttagctttatgaactggtttcagcagaaaccgggccagccgccgaaactgctgatttatgcgaccagcaaccgcggcagcggcgtgccggcgcgctttagcggcagcggcagcggcaccgattttagcctgaacattcatccggtggaagaagatgatagcgcgatgtatttttgccagcagaccaaagaagtgccgtggacctttggcggcggcaccaaactggaaattaaacgc

SEQ ID NO: 1167 - DNA, 762 bp, synthetic construct
  source 1..762: mol_type = other DNA; note = 3DX.2 nucleic acid
gatattgtgctgacccagagcccggcgagcctggcggtgagcctgggccagcgcgcgaccattagctgccgcgcgagcgaaagcgtggataactatggctttagctttatgaactggtttcagcagaaaccgggccagccgccgaaactgctgatttatgcgaccagcaaccgcggcagcggcgtgccggcgcgctttagcggcagcggcagcggcaccgattttagcctgaacattcatccggtggaagaagatgatagcgcgatgtatttttgccagcagaccaaagaagtgccgtggacctttggcggcggcaccaaactggaaattaaacgcggcggcggcggcagcggcggcggcgatagcggcggcggcggcagcgaagtgaaactggtggaaagcggcggcgatctggtgaaaccgggcggcagcctgaaactgagctgcgcggcgagcggctttacctttagccattatggcatgagctgggtgcgccagaccccggataaacgcctggaatgggtggcgaccattggcagccgcggcacctatacccattatccggatagcgtgaaaggccgctttaccattagccgcgataacgataaaaacgcgctgtatctgcagatgaacagcctgcgcaccgaagataccgcgatgtattattgcgcgcgcaaaagcgaattttattattatggcaacacctattattatagcgcgatggattattggggccagggcgcgagcgtgaccgtgagcagc

SEQ ID NO: 1168 - DNA, 276 bp, synthetic construct
  source 1..276: mol_type = other DNA; note = OMOMYC nucleic acid
tctgataccgaggaaaatgtcaagcggagaacccacaacgtgctggaaagacagagacggaatgagctgaagcgctccttcttcgccctgcgggaccagatccccgagctggaaaacaacgagaaggcccctaaggtggtgatcctgaaaaaggctacagcctacatcctgagcgtgcaggccgagacccagaaactgatcagcgagatcgacctgctgagaaagcagaacgagcagctgaagcacaagctggaacaactcagaaacagctgcgcc

SEQ ID NO: 1169 - DNA, 261 bp, synthetic construct
  source 1..261: mol_type = other DNA; note = FOXP3DBD 337-423 nucleic acid
cggccccccttcacctacgccacactgatcagatgggccatcctggaagccccagaaaaacagcgcacccttaacgagatctaccactggttcaccagaatgttcgcctttttccggaaccaccctgccacctggaagaacgccattcggcacaacctgtctctgcacaagtgcttcgtgcgggtcgagagcgagaagggagctgtgtggaccgtggacgagctggagttccggaagaagcggagccaaagaccaagcagg

SEQ ID NO: 1170 - DNA, 342 bp, synthetic construct
  source 1..342: mol_type = other DNA; note = VL12.3 nucleic acid
ggcagccaacctgtgctgacacagagccccagcgtgtccgccgctcctcggcagcgggtgaccatcagcgtgtccggctctaatagcaacatcggctccaacaccgtgaactggatccagcagctgcctggaagagcccccgagctgctgatgtacgacgacgacctgctcgccccaggcgtgtctgatagattcagcggctctagaagcggcaccagcgccagcctgaccatcagcggactgcagtctgaagatgaggccgactactacgccgctacatgggacgatagcctgaacggctgggtgttcggcggcggaacaaaggtgaccgtcctgagcggc

SEQ ID NO: 1171 - DNA, 135 bp, synthetic construct
  source 1..135: mol_type = other DNA; note = TCF4 10-54 nucleic acid
gatgacctaggcgccaacgacgaactgatttccttcaaagacgagggcgaacaggaggagaagagctccgaaaactcctcggcagagagggatttagctgatgtcaaatcgtctctagtcaatgaatcagaaacg

SEQ ID NO: 1172 - DNA, 528 bp, synthetic construct
  source 1..528: mol_type = other DNA; note = CHIP URD (128-303) nucleic acid
cggctgaacttcggggacgacatccccagcgctcttcgaatcgcgaagaagaagcgctggaacagcattgaggagcggcgcatccaccaggagagcgagctgcactcctacctctccaggctcattgccgcggagcgtgagagggagctggaagagtgccagcgaaaccacgagggtgatgaggacgacagccacgtccgggcccagcaggcctgcattgaggccaagcacgacaagtacatggcggacatggacgagcttttttctcaggtggatgagaagaggaagaagcgagacatccccgactacctgtgtggcaagatcagctttgagctgatgcgggagccgtgcatcacgcccagtggcatcacctacgaccgcaaggacatcgaggagcacctgcagcgtgtgggtcattttgacccggtgaccaggagccccctgacccaggaacagctcatccccaacttggctatgaaggaggttattgacgcattcatctctgagaatggctgggtggaggactac

SEQ ID NO: 1173 - DNA, 381 bp, synthetic construct
  source 1..381: mol_type = other DNA; note = RNF125 URD (2-128) nucleic acid
ggctccgtgctgagcaccgacagcggcaaatcggcgcccgcctctgccaccgcgcgggccctggagcgcaggagggacccggagttgcccgtcacgtccttcgactgcgccgtgtgccttgaggtgttacaccagcctgtccggacccgctgcggccacgtattctgccgttcctgtattgctaccagtctgaagaacaacaagtggacctgtccttattgccgggcatatcttccttcagaaggagttccagcaactgatgtagccaaaagaatgaaatcagagtataagaactgcgctgagtgtgacaccctggtttgcctcagtgaaatgagggcacatattcggacttgtcagaagtacatagataagtatggacca

SEQ ID NO: 1174 - DNA, 1068 bp, synthetic construct
  source 1..1068: mol_type = other DNA; note = E6AP URD (520-875) nucleic acid
aatccatatttgagactcaaagttagacgtgaccatatcatagatgatgcacttgtccggctagagatgatcgctatggaaaatcctgcagacttgaagaagcagttgtatgtggaatttgaaggagaacaaggagttgatgagggaggtgtttccaaagaattttttcagctggttgtggaggaaatcttcaatccagatattggtatgttcacatacgatgaatctacaaaattgttttggtttaatccatcttcttttgaaactgagggtcagtttactctgattggcatagtactgggtctggctatttacaataactgtatactggatgtacattttcccatggttgtctacaggaagctaatggggaaaaaaggaacttttcgtgacttgggagactctcacccagttctatatcagagtttaaaagatttattggagtatgaagggaatgtggaagatgacatgatgatcactttccagatatcacagacagatctttttggtaacccaatgatgtatgatctaaaggaaaatggtgataaaattccaattacaaatgaaaacaggaaggaatttgtcaatctttattctgactacattctcaataaatcagtagaaaaacagttcaaggcttttcggagaggttttcatatggtgaccaatgaatctcccttaaagtacttattcagaccagaagaaattgaattgcttatatgtggaagccggaatctagatttccaagcactagaagaaactacagaatatgacggtggctataccagggactctgttctgattagggagttctgggaaatcgttcattcatttacagatgaacagaaaagactcttcttgcagtttacaacgggcacagacagagcacctgtgggaggactaggaaaattaaagatgattatagccaaaaatggcccagacacagaaaggttacctacatctcatacttgctttaatgtgcttttacttccggaatactcaagcaaagaaaaacttaaagagagattgttgaaggccatcacgtatgccaaaggatttggcatgctg

SEQ ID NO: 1175 - DNA, 1101 bp, synthetic construct
  source 1..1101: mol_type = other DNA; note = FBXW7 alpha URD (2-368) W365S nucleic acid
aatcaggaactgctctctgtgggcagcaaaagacgacgaactggaggctctctgagaggtaacccttcctcaagccaggtagatgaagaacagatgaatcgtgtggtagaggaggaacagcaacagcaactcagacaacaagaggaggagcacactgcaaggaatggtgaagttgttggagtagaacctagacctggaggccaaaatgattcccagcaaggacagttggaagaaaacaataatagatttatttcggtagatgaggactcctcaggaaaccaagaagaacaagaggaagatgaagaacatgctggtgaacaagatgaggaggatgaggaggaggaggagatggaccaggagagtgacgattttgatcagtctgatgatagtagcagagaagatgaacatacacatactaacagtgtcacgaactccagtagtattgtggacctgcccgttcaccaactctcctccccattctatacaaaaacaacaaaaatgaaaagaaagttggaccatggttctgaggtccgctctttttctttgggaaagaaaccatgcaaagtctcagaatatacaagtaccactgggcttgtaccatgttcagcaacaccaacaacttttggggacctcagagcagccaatggccaagggcaacaacgacgccgaattacatctgtccagccacctacaggcctccaggaatggctaaaaatgtttcagagctggagtggaccagagaaattgcttgctttagatgaactcattgatagttgtgaaccaacacaagtaaaacatatgatgcaagtgatagaaccccagtttcaacgagacttcatttcattgctccctaaagagttggcactctatgtgctttcattcctggaacccaaagacctgctacaagcagctcagacatgtcgctactggagaattttggctgaagacaaccttctctggagagagaaatgcaaagaagaggggattgatgaaccattgcacatcaagagaagaaaagtaataaaaccaggtttcatacacagtccatggaaaagtgcatacatcagacagcacagaattgatactaactcgaggcgagga

SEQ ID NO: 1176 - DNA, 861 bp, synthetic construct
  source 1..861: mol_type = other DNA; note = FBXW7 beta URD (2-228) W285S nucleic acid
tgtgtcccgagaagcggtttgatactgagctgcatttgcctttactgtggagttttgttgccggttctgctccctaatcttccttttctgacgtgcctgagcatgtccacattagaatctgtgacatacctacctgaaaaaggtttatattgtcagagactgccaagcagccggacacacgggggcacagaatcactgaaggggaaaaatacagaaaatatgggtttctacggcacattaaaaatgattttttacaaaatgaaaagaaagttggaccatggttctgaggtccgctctttttctttgggaaagaaaccatgcaaagtctcagaatatacaagtaccactgggcttgtaccatgttcagcaacaccaacaacttttggggacctcagagcagccaatggccaagggcaacaacgacgccgaattacatctgtccagccacctacaggcctccaggaatggctaaaaatgtttcagagctggagtggaccagagaaattgcttgctttagatgaactcattgatagttgtgaaccaacacaagtaaaacatatgatgcaagtgatagaaccccagtttcaacgagacttcatttcattgctccctaaagagttggcactctatgtgctttcattcctggaacccaaagacctgctacaagcagctcagacatgtcgctactggagaattttggctgaagacaaccttctctggagagagaaatgcaaagaagaggggattgatgaaccattgcacatcaagagaagaaaagtaataaaaccaggtttcatacacagtccatggaaaagtgcatacatcagacagcacagaattgatactaactcgaggcgagga

SEQ ID NO: 1177 - DNA, 963 bp, synthetic construct
  source 1..963: mol_type = other DNA; note = Keap1 URD (2-322) nucleic acid
cagccagatcccaggcctagcggggctggggcctgctgccgattcctgcccctgcagtcacagtgccctgagggggcaggggacgcggtgatgtacgcctccactgagtgcaaggcggaggtgacgccctcccagcatggcaaccgcaccttcagctacaccctggaggatcataccaagcaggcctttggcatcatgaacgagctgcggctcagccagcagctgtgtgacgtcacactgcaggtcaagtaccaggatgcaccggccgcccagttcatggcccacaaggtggtgctggcctcatccagccctgtcttcaaggccatgttcaccaacgggctgcgggagcagggcatggaggtggtgtccattgagggtatccaccccaaggtcatggagcgcctcattgaattcgcctacacggcctccatctccatgggcgagaagtgtgtcctccacgtcatgaacggtgctgtcatgtaccagatcgacagcgttgtccgtgcctgcagtgacttcctggtgcagcagctggaccccagcaatgccatcggcatcgccaacttcgctgagcagattggctgtgtggagttgcaccagcgtgcccgggagtacatctacatgcattttggggaggtggccaagcaagaggagttcttcaacctgtcccactgccaactggtgaccctcatcagccgggacgacctgaacgtgcgctgcgagtccgaggtcttccacgcctgcatcaactgggtcaagtacgactgcgaacagcgacggttctacgtccaggcgctgctgcgggccgtgcgctgccactcgttgacgccgaacttcctgcagatgcagctgcagaagtgcgagatcctgcagtccgactcccgctgcaaggactacctggtcaagatcttcgaggagctcaccctgcacaagcccacgcaggtgatgccctgccgggcgccc

SEQ ID NO: 1178 - DNA, 684 bp, synthetic construct
  source 1..684: mol_type = other DNA; note = SPOP URD (147-374) nucleic acid
aacgggcttctccctgatgacaagcttaccctcttctgcgaggtgagtgttgtgcaagattctgtcaacatttctggccagaataccatgaacatggtaaaggttcctgagtgccggctggcagatgagttaggaggactgtgggagaattcccggttcacagactgctgcttgtgtgttgccggccaggaattccaggctcacaaggctatcttagcagctcgttctccggtttttagtgccatgtttgaacatgaaatggaggagagcaaaaagaatcgagttgaaatcaatgatgtggagcctgaagtttttaaggaaatgatgtgcttcatttacacggggaaggctccaaacctcgacaaaatggctgatgatttgctggcagctgctgacaagtatgccctggagcgcttaaaggtcatgtgtgaggatgccctctgcagtaacctgtccgtggagaacgctgcagaaattctcatcctggccgacctccacagtgcagatcagttgaaaactcaggcagtggatttcatcaactatcatgcttcggatgtcttggagacctctgggtggaagtcaatggtggtgtcacatccccacttggtggctgaggcataccgctctctggcttcagcacagtgcccttttctgggacccccacgcaaacgcctgaagcaatcc

SEQ ID NO: 1179 - DNA, 105 bp, synthetic construct
  source 1..105: mol_type = other DNA; note = DCAF1 truncated URD (1045-1079) nucleic acid
caggcgccgattaactttaccagccgcctgaaccgccgcgcgagctttccgaaatatggcggcgtggatggcggctgctttgatcgccatctgatttttagccgc

SEQ ID NO: 1180 - skipped

SEQ ID NO: 1181 - DNA, 12 bp, synthetic construct
  source 1..12: mol_type = other DNA; note = 2xGS linker nucleic acid
ggcagcggcagc

SEQ ID NO: 1182 - DNA, 18 bp, synthetic construct
  source 1..18: mol_type = other DNA; note = 3xGS linker nucleic acid
ggcagcggcagcggcagc

SEQ ID NO: 1183 - DNA, 24 bp, synthetic construct
  source 1..24: mol_type = other DNA; note = 4xGS linker nucleic acid
ggcagcggcagcggcagcggcagc

SEQ ID NO: 1184 - DNA, 30 bp, synthetic construct
  source 1..30: mol_type = other DNA; note = 5xGS linker nucleic acid
ggcagcggcagcggcagcggcagcggcagc

SEQ ID NO: 1185 - DNA, 36 bp, synthetic construct
  source 1..36: mol_type = other DNA; note = 6xGS linker nucleic acid
ggcagcggcagcggcagcggcagcggcagcggcagc

SEQ ID NO: 1186 - DNA, 27 bp, synthetic construct
  source 1..27: mol_type = other DNA; note = HA epitope tag nucleic acid
tacccatacgatgttccagattacgct

SEQ ID NO: 1187 - DNA, 27 bp, synthetic construct
  source 1..27: mol_type = other DNA; note = nuclear localization signal (NLS) nucleic acid
ccggcggcgaaacgcgtgaaactggat

SEQ ID NO: 1188 - DNA, 1338 bp, synthetic construct
  source 1..1338: mol_type = other DNA; note = 3DX.1-(GS)1-CHIP-NLS nucleic acid
atggaagtgaaactggtggaaagcggcggcgatctggtgaaaccgggcggcagcctgaaactgagctgcgcggcgagcggctttacctttagccattatggcatgagctgggtgcgccagaccccggataaacgcctggaatgggtggcgaccattggcagccgcggcacctatacccattatccggatagcgtgaaaggccgctttaccattagccgcgataacgataaaaacgcgctgtatctgcagatgaacagcctgcgcaccgaagataccgcgatgtattattgcgcgcgcaaaagcgaattttattattatggcaacacctattattatagcgcgatggattattggggccagggcgcgagcgtgaccgtgagcagcggcggcggcggcagcggcggcggcgatagcggcggcggcggcagcgatattgtgctgacccagagcccggcgagcctggcggtgagcctgggccagcgcgcgaccattagctgccgcgcgagcgaaagcgtggataactatggctttagctttatgaactggtttcagcagaaaccgggccagccgccgaaactgctgatttatgcgaccagcaaccgcggcagcggcgtgccggcgcgctttagcggcagcggcagcggcaccgattttagcctgaacattcatccggtggaagaagatgatagcgcgatgtatttttgccagcagaccaaagaagtgccgtggacctttggcggcggcaccaaactggaaattaaacgcggcagccggctgaacttcggggacgacatccccagcgctcttcgaatcgcgaagaagaagcgctggaacagcattgaggagcggcgcatccaccaggagagcgagctgcactcctacctctccaggctcattgccgcggagcgtgagagggagctggaagagtgccagcgaaaccacgagggtgatgaggacgacagccacgtccgggcccagcaggcctgcattgaggccaagcacgacaagtacatggcggacatggacgagcttttttctcaggtggatgagaagaggaagaagcgagacatccccgactacctgtgtggcaagatcagctttgagctgatgcgggagccgtgcatcacgcccagtggcatcacctacgaccgcaaggacatcgaggagcacctgcagcgtgtgggtcattttgacccggtgaccaggagccccctgacccaggaacagctcatccccaacttggctatgaaggaggttattgacgcattcatctctgagaatggctgggtggaggactacggcagcggcagcccggcggcgaaacgcgtgaaactggat

SEQ ID NO: 1189 - DNA, 1344 bp, synthetic construct
  source 1..1344: mol_type = other DNA; note = 3DX.1-(GS)2-CHIP-NLS nucleic acid
atggaagtgaaactggtggaaagcggcggcgatctggtgaaaccgggcggcagcctgaaactgagctgcgcggcgagcggctttacctttagccattatggcatgagctgggtgcgccagaccccggataaacgcctggaatgggtggcgaccattggcagccgcggcacctatacccattatccggatagcgtgaaaggccgctttaccattagccgcgataacgataaaaacgcgctgtatctgcagatgaacagcctgcgcaccgaagataccgcgatgtattattgcgcgcgcaaaagcgaattttattattatggcaacacctattattatagcgcgatggattattggggccagggcgcgagcgtgaccgtgagcagcggcggcggcggcagcggcggcggcgatagcggcggcggcggcagcgatattgtgctgacccagagcccggcgagcctggcggtgagcctgggccagcgcgcgaccattagctgccgcgcgagcgaaagcgtggataactatggctttagctttatgaactggtttcagcagaaaccgggccagccgccgaaactgctgatttatgcgaccagcaaccgcggcagcggcgtgccggcgcgctttagcggcagcggcagcggcaccgattttagcctgaacattcatccggtggaagaagatgatagcgcgatgtatttttgccagcagaccaaagaagtgccgtggacctttggcggcggcaccaaactggaaattaaacgcggcagcggcagccggctgaacttcggggacgacatccccagcgctcttcgaatcgcgaagaagaagcgctggaacagcattgaggagcggcgcatccaccaggagagcgagctgcactcctacctctccaggctcattgccgcggagcgtgagagggagctggaagagtgccagcgaaaccacgagggtgatgaggacgacagccacgtccgggcccagcaggcctgcattgaggccaagcacgacaagtacatggcggacatggacgagcttttttctcaggtggatgagaagaggaagaagcgagacatccccgactacctgtgtggcaagatcagctttgagctgatgcgggagccgtgcatcacgcccagtggcatcacctacgaccgcaaggacatcgaggagcacctgcagcgtgtgggtcattttgacccggtgaccaggagccccctgacccaggaacagctcatccccaacttggctatgaaggaggttattgacgcattcatctctgagaatggctgggtggaggactacggcagcggcagcccggcggcgaaacgcgtgaaactggat

SEQ ID NO: 1190 - DNA, 1350 bp, synthetic construct
  source 1..1350: mol_type = other DNA; note = 3DX.1-(GS)3-CHIP-NLS nucleic acid
atggaagtgaaactggtggaaagcggcggcgatctggtgaaaccgggcggcagcctgaaactgagctgcgcggcgagcggctttacctttagccattatggcatgagctgggtgcgccagaccccggataaacgcctggaatgggtggcgaccattggcagccgcggcacctatacccattatccggatagcgtgaaaggccgctttaccattagccgcgataacgataaaaacgcgctgtatctgcagatgaacagcctgcgcaccgaagataccgcgatgtattattgcgcgcgcaaaagcgaattttattattatggcaacacctattattatagcgcgatggattattggggccagggcgcgagcgtgaccgtgagcagcggcggcggcggcagcggcggcggcgatagcggcggcggcggcagcgatattgtgctgacccagagcccggcgagcctggcggtgagcctgggccagcgcgcgaccattagctgccgcgcgagcgaaagcgtggataactatggctttagctttatgaactggtttcagcagaaaccgggccagccgccgaaactgctgatttatgcgaccagcaaccgcggcagcggcgtgccggcgcgctttagcggcagcggcagcggcaccgattttagcctgaacattcatccggtggaagaagatgatagcgcgatgtatttttgccagcagaccaaagaagtgccgtggacctttggcggcggcaccaaactggaaattaaacgcggcagcggcagcggcagccggctgaacttcggggacgacatccccagcgctcttcgaatcgcgaagaagaagcgctggaacagcattgaggagcggcgcatccaccaggagagcgagctgcactcctacctctccaggctcattgccgcggagcgtgagagggagctggaagagtgccagcgaaaccacgagggtgatgaggacgacagccacgtccgggcccagcaggcctgcattgaggccaagcacgacaagtacatggcggacatggacgagcttttttctcaggtggatgagaagaggaagaagcgagacatccccgactacctgtgtggcaagatcagctttgagctgatgcgggagccgtgcatcacgcccagtggcatcacctacgaccgcaaggacatcgaggagcacctgcagcgtgtgggtcattttgacccggtgaccaggagccccctgacccaggaacagctcatccccaacttggctatgaaggaggttattgacgcattcatctctgagaatggctgggtggaggactacggcagcggcagcccggcggcgaaacgcgtgaaactggat

SEQ ID NO: 1191 - DNA, 1356 bp, synthetic construct
  source 1..1356: mol_type = other DNA; note = 3DX.1-(GS)4-CHIP-NLS nucleic acid
atggaagtgaaactggtggaaagcggcggcgatctggtgaaaccgggcggcagcctgaaactgagctgcgcggcgagcggctttacctttagccattatggcatgagctgggtgcgccagaccccggataaacgcctggaatgggtggcgaccattggcagccgcggcacctatacccattatccggatagcgtgaaaggccgctttaccattagccgcgataacgataaaaacgcgctgtatctgcagatgaacagcctgcgcaccgaagataccgcgatgtattattgcgcgcgcaaaagcgaattttattattatggcaacacctattattatagcgcgatggattattggggccagggcgcgagcgtgaccgtgagcagcggcggcggcggcagcggcggcggcgatagcggcggcggcggcagcgatattgtgctgacccagagcccggcgagcctggcggtgagcctgggccagcgcgcgaccattagctgccgcgcgagcgaaagcgtggataactatggctttagctttatgaactggtttcagcagaaaccgggccagccgccgaaactgctgatttatgcgaccagcaaccgcggcagcggcgtgccggcgcgctttagcggcagcggcagcggcaccgattttagcctgaacattcatccggtggaagaagatgatagcgcgatgtatttttgccagcagaccaaagaagtgccgtggacctttggcggcggcaccaaactggaaattaaacgcggcagcggcagcggcagcggcagccggctgaacttcggggacgacatccccagcgctcttcgaatcgcgaagaagaagcgctggaacagcattgaggagcggcgcatccaccaggagagcgagctgcactcctacctctccaggctcattgccgcggagcgtgagagggagctggaagagtgccagcgaaaccacgagggtgatgaggacgacagccacgtccgggcccagcaggcctgcattgaggccaagcacgacaagtacatggcggacatggacgagcttttttctcaggtggatgagaagaggaagaagcgagacatccccgactacctgtgtggcaagatcagctttgagctgatgcgggagccgtgcatcacgcccagtggcatcacctacgaccgcaaggacatcgaggagcacctgcagcgtgtgggtcattttgacccggtgaccaggagccccctgacccaggaacagctcatccccaacttggctatgaaggaggttattgacgcattcatctctgagaatggctgggtggaggactacggcagcggcagcccggcggcgaaacgcgtgaaactggat

SEQ ID NO: 1192 - DNA, 1362 bp, synthetic construct
  source 1..1362: mol_type = other DNA; note = 3DX.1-(GS)5-CHIP-NLS nucleic acid
atggaagtgaaactggtggaaagcggcggcgatctggtgaaaccgggcggcagcctgaaactgagctgcgcggcgagcggctttacctttagccattatggcatgagctgggtgcgccagaccccggataaacgcctggaatgggtggcgaccattggcagccgcggcacctatacccattatccggatagcgtgaaaggccgctttaccattagccgcgataacgataaaaacgcgctgtatctgcagatgaacagcctgcgcaccgaagataccgcgatgtattattgcgcgcgcaaaagcgaattttattattatggcaacacctattattatagcgcgatggattattggggccagggcgcgagcgtgaccgtgagcagcggcggcggcggcagcggcggcggcgatagcggcggcggcggcagcgatattgtgctgacccagagcccggcgagcctggcggtgagcctgggccagcgcgcgaccattagctgccgcgcgagcgaaagcgtggataactatggctttagctttatgaactggtttcagcagaaaccgggccagccgccgaaactgctgatttatgcgaccagcaaccgcggcagcggcgtgccggcgcgctttagcggcagcggcagcggcaccgattttagcctgaacattcatccggtggaagaagatgatagcgcgatgtatttttgccagcagaccaaagaagtgccgtggacctttggcggcggcaccaaactggaaattaaacgcggcagcggcagcggcagcggcagcggcagccggctgaacttcggggacgacatccccagcgctcttcgaatcgcgaagaagaagcgctggaacagcattgaggagcggcgcatccaccaggagagcgagctgcactcctacctctccaggctcattgccgcggagcgtgagagggagctggaagagtgccagcgaaaccacgagggtgatgaggacgacagccacgtccgggcccagcaggcctgcattgaggccaagcacgacaagtacatggcggacatggacgagcttttttctcaggtggatgagaagaggaagaagcgagacatccccgactacctgtgtggcaagatcagctttgagctgatgcgggagccgtgcatcacgcccagtggcatcacctacgaccgcaaggacatcgaggagcacctgcagcgtgtgggtcattttgacccggtgaccaggagccccctgacccaggaacagctcatccccaacttggctatgaaggaggttattgacgcattcatctctgagaatggctgggtggaggactacggcagcggcagcccggcggcgaaacgcgtgaaactggat

SEQ ID NO: 1193 - DNA, 1368 bp, synthetic construct
  source 1..1368: mol_type = other DNA; note = 3DX.1-(GS)6-CHIP-NLS nucleic acid
atggaagtgaaactggtggaaagcggcggcgatctggtgaaaccgggcggcagcctgaaactgagctgcgcggcgagcggctttacctttagccattatggcatgagctgggtgcgccagaccccggataaacgcctggaatgggtggcgaccattggcagccgcggcacctatacccattatccggatagcgtgaaaggccgctttaccattagccgcgataacgataaaaacgcgctgtatctgcagatgaacagcctgcgcaccgaagataccgcgatgtattattgcgcgcgcaaaagcgaattttattattatggcaacacctattattatagcgcgatggattattggggccagggcgcgagcgtgaccgtgagcagcggcggcggcggcagcggcggcggcgatagcggcggcggcggcagcgatattgtgctgacccagagcccggcgagcctggcggtgagcctgggccagcgcgcgaccattagctgccgcgcgagcgaaagcgtggataactatggctttagctttatgaactggtttcagcagaaaccgggccagccgccgaaactgctgatttatgcgaccagcaaccgcggcagcggcgtgccggcgcgctttagcggcagcggcagcggcaccgattttagcctgaacattcatccggtggaagaagatgatagcgcgatgtatttttgccagcagaccaaagaagtgccgtggacctttggcggcggcaccaaactggaaattaaacgcggcagcggcagcggcagcggcagcggcagcggcagccggctgaacttcggggacgacatccccagcgctcttcgaatcgcgaagaagaagcgctggaacagcattgaggagcggcgcatccaccaggagagcgagctgcactcctacctctccaggctcattgccgcggagcgtgagagggagctggaagagtgccagcgaaaccacgagggtgatgaggacgacagccacgtccgggcccagcaggcctgcattgaggccaagcacgacaagtacatggcggacatggacgagcttttttctcaggtggatgagaagaggaagaagcgagacatccccgactacctgtgtggcaagatcagctttgagctgatgcgggagccgtgcatcacgcccagtggcatcacctacgaccgcaaggacatcgaggagcacctgcagcgtgtgggtcattttgacccggtgaccaggagccccctgacccaggaacagctcatccccaacttggctatgaaggaggttattgacgcattcatctctgagaatggctgggtggaggactacggcagcggcagcccggcggcgaaacgcgtgaaactggat

SEQ ID NO: 1194 - DNA, 1368 bp, synthetic construct
  source 1..1368: mol_type = other DNA; note = 3DX.1-(GS)1-CHIP-NLS-HA nucleic acid
atggaagtgaaactggtggaaagcggcggcgatctggtgaaaccgggcggcagcctgaaactgagctgcgcggcgagcggctttacctttagccattatggcatgagctgggtgcgccagaccccggataaacgcctggaatgggtggcgaccattggcagccgcggcacctatacccattatccggatagcgtgaaaggccgctttaccattagccgcgataacgataaaaacgcgctgtatctgcagatgaacagcctgcgcaccgaagataccgcgatgtattattgcgcgcgcaaaagcgaattttattattatggcaacacctattattatagcgcgatggattattggggccagggcgcgagcgtgaccgtgagcagcggcggcggcggcagcggcggcggcgatagcggcggcggcggcagcgatattgtgctgacccagagcccggcgagcctggcggtgagcctgggccagcgcgcgaccattagctgccgcgcgagcgaaagcgtggataactatggctttagctttatgaactggtttcagcagaaaccgggccagccgccgaaactgctgatttatgcgaccagcaaccgcggcagcggcgtgccggcgcgctttagcggcagcggcagcggcaccgattttagcctgaacattcatccggtggaagaagatgatagcgcgatgtatttttgccagcagaccaaagaagtgccgtggacctttggcggcggcaccaaactggaaattaaacgcggcagccggctgaacttcggggacgacatccccagcgctcttcgaatcgcgaagaagaagcgctggaacagcattgaggagcggcgcatccaccaggagagcgagctgcactcctacctctccaggctcattgccgcggagcgtgagagggagctggaagagtgccagcgaaaccacgagggtgatgaggacgacagccacgtccgggcccagcaggcctgcattgaggccaagcacgacaagtacatggcggacatggacgagcttttttctcaggtggatgagaagaggaagaagcgagacatccccgactacctgtgtggcaagatcagctttgagctgatgcgggagccgtgcatcacgcccagtggcatcacctacgaccgcaaggacatcgaggagcacctgcagcgtgtgggtcattttgacccggtgaccaggagccccctgacccaggaacagctcatccccaacttggctatgaaggaggttattgacgcattcatctctgagaatggctgggtggaggactacggcagcggcagcccggcggcgaaacgcgtgaaactggattacccatacgatgttccagattacgcttaa

SEQ ID NO: 1195 - DNA, 1374 bp, synthetic construct
  source 1..1374: mol_type = other DNA; note = 3DX.1-(GS)2-CHIP-NLS-HA nucleic acid
atggaagtgaaactggtggaaagcggcggcgatctggtgaaaccgggcggcagcctgaaactgagctgcgcggcgagcggctttacctttagccattatggcatgagctgggtgcgccagaccccggataaacgcctggaatgggtggcgaccattggcagccgcggcacctatacccattatccggatagcgtgaaaggccgctttaccattagccgcgataacgataaaaacgcgctgtatctgcagatgaacagcctgcgcaccgaagataccgcgatgtattattgcgcgcgcaaaagcgaattttattattatggcaacacctattattatagcgcgatggattattggggccagggcgcgagcgtgaccgtgagcagcggcggcggcggcagcggcggcggcgatagcggcggcggcggcagcgatattgtgctgacccagagcccggcgagcctggcggtgagcctgggccagcgcgcgaccattagctgccgcgcgagcgaaagcgtggataactatggctttagctttatgaactggtttcagcagaaaccgggccagccgccgaaactgctgatttatgcgaccagcaaccgcggcagcggcgtgccggcgcgctttagcggcagcggcagcggcaccgattttagcctgaacattcatccggtggaagaagatgatagcgcgatgtatttttgccagcagaccaaagaagtgccgtggacctttggcggcggcaccaaactggaaattaaacgcggcagcggcagccggctgaacttcggggacgacatccccagcgctcttcgaatcgcgaagaagaagcgctggaacagcattgaggagcggcgcatccaccaggagagcgagctgcactcctacctctccaggctcattgccgcggagcgtgagagggagctggaagagtgccagcgaaaccacgagggtgatgaggacgacagccacgtccgggcccagcaggcctgcattgaggccaagcacgacaagtacatggcggacatggacgagcttttttctcaggtggatgagaagaggaagaagcgagacatccccgactacctgtgtggcaagatcagctttgagctgatgcgggagccgtgcatcacgcccagtggcatcacctacgaccgcaaggacatcgaggagcacctgcagcgtgtgggtcattttgacccggtgaccaggagccccctgacccaggaacagctcatccccaacttggctatgaaggaggttattgacgcattcatctctgagaatggctgggtggaggactacggcagcggcagcccggcggcgaaacgcgtgaaactggattacccatacgatgttccagattacgcttaa

SEQ ID NO: 1196 - DNA, 1380 bp, synthetic construct
  source 1..1380: mol_type = other DNA; note = 3DX.1-(GS)3-CHIP-NLS-HA nucleic acid
atggaagtgaaactggtggaaagcggcggcgatctggtgaaaccgggcggcagcctgaaactgagctgcgcggcgagcggctttacctttagccattatggcatgagctgggtgcgccagaccccggataaacgcctggaatgggtggcgaccattggcagccgcggcacctatacccattatccggatagcgtgaaaggccgctttaccattagccgcgataacgataaaaacgcgctgtatctgcagatgaacagcctgcgcaccgaagataccgcgatgtattattgcgcgcgcaaaagcgaattttattattatggcaacacctattattatagcgcgatggattattggggccagggcgcgagcgtgaccgtgagcagcggcggcggcggcagcggcggcggcgatagcggcggcggcggcagcgatattgtgctgacccagagcccggcgagcctggcggtgagcctgggccagcgcgcgaccattagctgccgcgcgagcgaaagcgtggataactatggctttagctttatgaactggtttcagcagaaaccgggccagccgccgaaactgctgatttatgcgaccagcaaccgcggcagcggcgtgccggcgcgctttagcggcagcggcagcggcaccgattttagcctgaacattcatccggtggaagaagatgatagcgcgatgtatttttgccagcagaccaaagaagtgccgtggacctttggcggcggcaccaaactggaaattaaacgcggcagcggcagcggcagccggctgaacttcggggacgacatccccagcgctcttcgaatcgcgaagaagaagcgctggaacagcattgaggagcggcgcatccaccaggagagcgagctgcactcctacctctccaggctcattgccgcggagcgtgagagggagctggaagagtgccagcgaaaccacgagggtgatgaggacgacagccacgtccgggcccagcaggcctgcattgaggccaagcacgacaagtacatggcggacatggacgagcttttttctcaggtggatgagaagaggaagaagcgagacatccccgactacctgtgtggcaagatcagctttgagctgatgcgggagccgtgcatcacgcccagtggcatcacctacgaccgcaaggacatcgaggagcacctgcagcgtgtgggtcattttgacccggtgaccaggagccccctgacccaggaacagctcatccccaacttggctatgaaggaggttattgacgcattcatctctgagaatggctgggtggaggactacggcagcggcagcccggcggcgaaacgcgtgaaactggattacccatacgatgttccagattacgcttaa

SEQ ID NO: 1197 - DNA, 1386 bp, synthetic construct
  source 1..1386: mol_type = other DNA; note = 3DX.1-(GS)4-CHIP-NLS-HA nucleic acid
atggaagtgaaactggtggaaagcggcggcgatctggtgaaaccgggcggcagcctgaaactgagctgcgcggcgagcggctttacctttagccattatggcatgagctgggtgcgccagaccccggataaacgcctggaatgggtggcgaccattggcagccgcggcacctatacccattatccggatagcgtgaaaggccgctttaccattagccgcgataacgataaaaacgcgctgtatctgcagatgaacagcctgcgcaccgaagataccgcgatgtattattgcgcgcgcaaaagcgaattttattattatggcaacacctattattatagcgcgatggattattggggccagggcgcgagcgtgaccgtgagcagcggcggcggcggcagcggcggcggcgatagcggcggcggcggcagcgatattgtgctgacccagagcccggcgagcctggcggtgagcctgggccagcgcgcgaccattagctgccgcgcgagcgaaagcgtggataactatggctttagctttatgaactggtttcagcagaaaccgggccagccgccgaaactgctgatttatgcgaccagcaaccgcggcagcggcgtgccggcgcgctttagcggcagcggcagcggcaccgattttagcctgaacattcatccggtggaagaagatgatagcgcgatgtatttttgccagcagaccaaagaagtgccgtggacctttggcggcggcaccaaactggaaattaaacgcggcagcggcagcggcagcggcagccggctgaacttcggggacgacatccccagcgctcttcgaatcgcgaagaagaagcgctggaacagcattgaggagcggcgcatccaccaggagagcgagctgcactcctacctctccaggctcattgccgcggagcgtgagagggagctggaagagtgccagcgaaaccacgagggtgatgaggacgacagccacgtccgggcccagcaggcctgcattgaggccaagcacgacaagtacatggcggacatggacgagcttttttctcaggtggatgagaagaggaagaagcgagacatccccgactacctgtgtggcaagatcagctttgagctgatgcgggagccgtgcatcacgcccagtggcatcacctacgaccgcaaggacatcgaggagcacctgcagcgtgtgggtcattttgacccggtgaccaggagccccctgacccaggaacagctcatccccaacttggctatgaaggaggttattgacgcattcatctctgagaatggctgggtggaggactacggcagcggcagcccggcggcgaaacgcgtgaaactggattacccatacgatgttccagattacgcttaa

SEQ ID NO: 1198 - DNA, 1392 bp, synthetic construct
  source 1..1392: mol_type = other DNA; note = 3DX.1-(GS)5-CHIP-NLS-HA nucleic acid
atggaagtgaaactggtggaaagcggcggcgatctggtgaaaccgggcggcagcctgaaactgagctgcgcggcgagcggctttacctttagccattatggcatgagctgggtgcgccagaccccggataaacgcctggaatgggtggcgaccattggcagccgcggcacctatacccattatccggatagcgtgaaaggccgctttaccattagccgcgataacgataaaaacgcgctgtatctgcagatgaacagcctgcgcaccgaagataccgcgatgtattattgcgcgcgcaaaagcgaattttattattatggcaacacctattattatagcgcgatggattattggggccagggcgcgagcgtgaccgtgagcagcggcggcggcggcagcggcggcggcgatagcggcggcggcggcagcgatattgtgctgacccagagcccggcgagcctggcggtgagcctgggccagcgcgcgaccattagctgccgcgcgagcgaaagcgtggataactatggctttagctttatgaactggtttcagcagaaaccgggccagccgccgaaactgctgatttatgcgaccagcaaccgcggcagcggcgtgccggcgcgctttagcggcagcggcagcggcaccgattttagcctgaacattcatccggtggaagaagatgatagcgcgatgtatttttgccagcagaccaaagaagtgccgtggacctttggcggcggcaccaaactggaaattaaacgcggcagcggcagcggcagcggcagcggcagccggctgaacttcggggacgacatccccagcgctcttcgaatcgcgaagaagaagcgctggaacagcattgaggagcggcgcatccaccaggagagcgagctgcactcctacctctccaggctcattgccgcggagcgtgagagggagctggaagagtgccagcgaaaccacgagggtgatgaggacgacagccacgtccgggcccagcaggcctgcattgaggccaagcacgacaagtacatggcggacatggacgagcttttttctcaggtggatgagaagaggaagaagcgagacatccccgactacctgtgtggcaagatcagctttgagctgatgcgggagccgtgcatcacgcccagtggcatcacctacgaccgcaaggacatcgaggagcacctgcagcgtgtgggtcattttgacccggtgaccaggagccccctgacccaggaacagctcatccccaacttggctatgaaggaggttattgacgcattcatctctgagaatggctgggtggaggactacggcagcggcagcccggcggcgaaacgcgtgaaactggattacccatacgatgttccagattacgcttaa

SEQ ID NO: 1199 - DNA, 1398 bp, synthetic construct
  source 1..1398: mol_type = other DNA; note = 3DX.1-(GS)6-CHIP-NLS-HA nucleic acid
atggaagtgaaactggtggaaagcggcggcgatctggtgaaaccgggcggcagcctgaaactgagctgcgcggcgagcggctttacctttagccattatggcatgagctgggtgcgccagaccccggataaacgcctggaatgggtggcgaccattggcagccgcggcacctatacccattatccggatagcgtgaaaggccgctttaccattagccgcgataacgataaaaacgcgctgtatctgcagatgaacagcctgcgcaccgaagataccgcgatgtattattgcgcgcgcaaaagcgaattttattattatggcaacacctattattatagcgcgatggattattggggccagggcgcgagcgtgaccgtgagcagcggcggcggcggcagcggcggcggcgatagcggcggcggcggcagcgatattgtgctgacccagagcccggcgagcctggcggtgagcctgggccagcgcgcgaccattagctgccgcgcgagcgaaagcgtggataactatggctttagctttatgaactggtttcagcagaaaccgggccagccgccgaaactgctgatttatgcgaccagcaaccgcggcagcggcgtgccggcgcgctttagcggcagcggcagcggcaccgattttagcctgaacattcatccggtggaagaagatgatagcgcgatgtatttttgccagcagaccaaagaagtgccgtggacctttggcggcggcaccaaactggaaattaaacgcggcagcggcagcggcagcggcagcggcagcggcagccggctgaacttcggggacgacatccccagcgctcttcgaatcgcgaagaagaagcgctggaacagcattgaggagcggcgcatccaccaggagagcgagctgcactcctacctctccaggctcattgccgcggagcgtgagagggagctggaagagtgccagcgaaaccacgagggtgatgaggacgacagccacgtccgggcccagcaggcctgcattgaggccaagcacgacaagtacatggcggacatggacgagcttttttctcaggtggatgagaagaggaagaagcgagacatccccgactacctgtgtggcaagatcagctttgagctgatgcgggagccgtgcatcacgcccagtggcatcacctacgaccgcaaggacatcgaggagcacctgcagcgtgtgggtcattttgacccggtgaccaggagccccctgacccaggaacagctcatccccaacttggctatgaaggaggttattgacgcattcatctctgagaatggctgggtggaggactacggcagcggcagcccggcggcgaaacgcgtgaaactggattacccatacgatgttccagattacgcttaa

SEQ ID NO: 1200 - DNA, 921 bp, synthetic construct
  source 1..921: mol_type = other DNA; note = NLS-DCAF1-(GS)1-3DX.1 nucleic acid
ccggcggcgaaacgcgtgaaactggatggcagcggcagcggcagccaggcgccgattaactttaccagccgcctgaaccgccgcgcgagctttccgaaatatggcggcgtggatggcggctgctttgatcgccatctgatttttagccgcggcagcgaagtgaaactggtggaaagcggcggcgatctggtgaaaccgggcggcagcctgaaactgagctgcgcggcgagcggctttacctttagccattatggcatgagctgggtgcgccagaccccggataaacgcctggaatgggtggcgaccattggcagccgcggcacctatacccattatccggatagcgtgaaaggccgctttaccattagccgcgataacgataaaaacgcgctgtatctgcagatgaacagcctgcgcaccgaagataccgcgatgtattattgcgcgcgcaaaagcgaattttattattatggcaacacctattattatagcgcgatggattattggggccagggcgcgagcgtgaccgtgagcagcggcggcggcggcagcggcggcggcgatagcggcggcggcggcagcgatattgtgctgacccagagcccggcgagcctggcggtgagcctgggccagcgcgcgaccattagctgccgcgcgagcgaaagcgtggataactatggctttagctttatgaactggtttcagcagaaaccgggccagccgccgaaactgctgatttatgcgaccagcaaccgcggcagcggcgtgccggcgcgctttagcggcagcggcagcggcaccgattttagcctgaacattcatccggtggaagaagatgatagcgcgatgtatttttgccagcagaccaaagaagtgccgtggacctttggcggcggcaccaaactggaaattaaacgctaa

SEQ ID NO: 1201 - DNA, 927 bp, synthetic construct
  source 1..927: mol_type = other DNA; note = NLS-DCAF1-(GS)2-3DX.1 nucleic acid
ccggcggcgaaacgcgtgaaactggatggcagcggcagcggcagccaggcgccgattaactttaccagccgcctgaaccgccgcgcgagctttccgaaatatggcggcgtggatggcggctgctttgatcgccatctgatttttagccgcggcagcggcagcgaagtgaaactggtggaaagcggcggcgatctggtgaaaccgggcggcagcctgaaactgagctgcgcggcgagcggctttacctttagccattatggcatgagctgggtgcgccagaccccggataaacgcctggaatgggtggcgaccattggcagccgcggcacctatacccattatccggatagcgtgaaaggccgctttaccattagccgcgataacgataaaaacgcgctgtatctgcagatgaacagcctgcgcaccgaagataccgcgatgtattattgcgcgcgcaaaagcgaattttattattatggcaacacctattattatagcgcgatggattattggggccagggcgcgagcgtgaccgtgagcagcggcggcggcggcagcggcggcggcgatagcggcggcggcggcagcgatattgtgctgacccagagcccggcgagcctggcggtgagcctgggccagcgcgcgaccattagctgccgcgcgagcgaaagcgtggataactatggctttagctttatgaactggtttcagcagaaaccgggccagccgccgaaactgctgatttatgcgaccagcaaccgcggcagcggcgtgccggcgcgctttagcggcagcggcagcggcaccgattttagcctgaacattcatccggtggaagaagatgatagcgcgatgtatttttgccagcagaccaaagaagtgccgtggacctttggcggcggcaccaaactggaaattaaacgctaa

SEQ ID NO: 1202 - DNA, 933 bp, synthetic construct
  source 1..933: mol_type = other DNA; note = NLS-DCAF1-(GS)3-3DX.1 nucleic acid
ccggcggcgaaacgcgtgaaactggatggcagcggcagcggcagccaggcgccgattaactttaccagccgcctgaaccgccgcgcgagctttccgaaatatggcggcgtggatggcggctgctttgatcgccatctgatttttagccgcggcagcggcagcggcagcgaagtgaaactggtggaaagcggcggcgatctggtgaaaccgggcggcagcctgaaactgagctgcgcggcgagcggctttacctttagccattatggcatgagctgggtgcgccagaccccggataaacgcctggaatgggtggcgaccattggcagccgcggcacctatacccattatccggatagcgtgaaaggccgctttaccattagccgcgataacgataaaaacgcgctgtatctgcagatgaacagcctgcgcaccgaagataccgcgatgtattattgcgcgcgcaaaagcgaattttattattatggcaacacctattattatagcgcgatggattattggggccagggcgcgagcgtgaccgtgagcagcggcggcggcggcagcggcggcggcgatagcggcggcggcggcagcgatattgtgctgacccagagcccggcgagcctggcggtgagcctgggccagcgcgcgaccattagctgccgcgcgagcgaaagcgtggataactatggctttagctttatgaactggtttcagcagaaaccgggccagccgccgaaactgctgatttatgcgaccagcaaccgcggcagcggcgtgccggcgcgctttagcggcagcggcagcggcaccgattttagcctgaacattcatccggtggaagaagatgatagcgcgatgtatttttgccagcagaccaaagaagtgccgtggacctttggcggcggcaccaaactggaaattaaacgctaa

SEQ ID NO: 1203 - DNA, 939 bp, synthetic construct
  source 1..939: mol_type = other DNA; note = NLS-DCAF1-(GS)4-3DX.1 nucleic acid
ccggcggcgaaacgcgtgaaactggatggcagcggcagcggcagccaggcgccgattaactttaccagccgcctgaaccgccgcgcgagctttccgaaatatggcggcgtggatggcggctgctttgatcgccatctgatttttagccgcggcagcggcagcggcagcggcagcgaagtgaaactggtggaaagcggcggcgatctggtgaaaccgggcggcagcctgaaactgagctgcgcggcgagcggctttacctttagccattatggcatgagctgggtgcgccagaccccggataaacgcctggaatgggtggcgaccattggcagccgcggcacctatacccattatccggatagcgtgaaaggccgctttaccattagccgcgataacgataaaaacgcgctgtatctgcagatgaacagcctgcgcaccgaagataccgcgatgtattattgcgcgcgcaaaagcgaattttattattatggcaacacctattattatagcgcgatggattattggggccagggcgcgagcgtgaccgtgagcagcggcggcggcggcagcggcggcggcgatagcggcggcggcggcagcgatattgtgctgacccagagcccggcgagcctggcggtgagcctgggccagcgcgcgaccattagctgccgcgcgagcgaaagcgtggataactatggctttagctttatgaactggtttcagcagaaaccgggccagccgccgaaactgctgatttatgcgaccagcaaccgcggcagcggcgtgccggcgcgctttagcggcagcggcagcggcaccgattttagcctgaacattcatccggtggaagaagatgatagcgcgatgtatttttgccagcagaccaaagaagtgccgtggacctttggcggcggcaccaaactggaaattaaacgctaa

SEQ ID NO: 1204 - DNA, 945 bp, synthetic construct
  source 1..945: mol_type = other DNA; note = NLS-DCAF1-(GS)5-3DX.1 nucleic acid
ccggcggcgaaacgcgtgaaactggatggcagcggcagcggcagccaggcgccgattaactttaccagccgcctgaaccgccgcgcgagctttccgaaatatggcggcgtggatggcggctgctttgatcgccatctgatttttagccgcggcagcggcagcggcagcggcagcggcagcgaagtgaaactggtggaaagcggcggcgatctggtgaaaccgggcggcagcctgaaactgagctgcgcggcgagcggctttacctttagccattatggcatgagctgggtgcgccagaccccggataaacgcctggaatgggtggcgaccattggcagccgcggcacctatacccattatccggatagcgtgaaaggccgctttaccattagccgcgataacgataaaaacgcgctgtatctgcagatgaacagcctgcgcaccgaagataccgcgatgtattattgcgcgcgcaaaagcgaattttattattatggcaacacctattattatagcgcgatggattattggggccagggcgcgagcgtgaccgtgagcagcggcggcggcggcagcggcggcggcgatagcggcggcggcggcagcgatattgtgctgacccagagcccggcgagcctggcggtgagcctgggccagcgcgcgaccattagctgccgcgcgagcgaaagcgtggataactatggctttagctttatgaactggtttcagcagaaaccgggccagccgccgaaactgctgatttatgcgaccagcaaccgcggcagcggcgtgccggcgcgctttagcggcagcggcagcggcaccgattttagcctgaacattcatccggtggaagaagatgatagcgcgatgtatttttgccagcagaccaaagaagtgccgtggacctttggcggcggcaccaaactggaaattaaacgctaa

SEQ ID NO: 1205 - DNA, 951 bp, synthetic construct
  source 1..951: mol_type = other DNA; note = NLS-DCAF1-(GS)6-3DX.1 nucleic acid
ccggcggcgaaacgcgtgaaactggatggcagcggcagcggcagccaggcgccgattaactttaccagccgcctgaaccgccgcgcgagctttccgaaatatggcggcgtggatggcggctgctttgatcgccatctgatttttagccgcggcagcggcagcggcagcggcagcggcagcggcagcgaagtgaaactggtggaaagcggcggcgatctggtgaaaccgggcggcagcctgaaactgagctgcgcggcgagcggctttacctttagccattatggcatgagctgggtgcgccagaccccggataaacgcctggaatgggtggcgaccattggcagccgcggcacctatacccattatccggatagcgtgaaaggccgctttaccattagccgcgataacgataaaaacgcgctgtatctgcagatgaacagcctgcgcaccgaagataccgcgatgtattattgcgcgcgcaaaagcgaattttattattatggcaacacctattattatagcgcgatggattattggggccagggcgcgagcgtgaccgtgagcagcggcggcggcggcagcggcggcggcgatagcggcggcggcggcagcgatattgtgctgacccagagcccggcgagcctggcggtgagcctgggccagcgcgcgaccattagctgccgcgcgagcgaaagcgtggataactatggctttagctttatgaactggtttcagcagaaaccgggccagccgccgaaactgctgatttatgcgaccagcaaccgcggcagcggcgtgccggcgcgctttagcggcagcggcagcggcaccgattttagcctgaacattcatccggtggaagaagatgatagcgcgatgtatttttgccagcagaccaaagaagtgccgtggacctttggcggcggcaccaaactggaaattaaacgctaa

SEQ ID NO: 1206 - DNA, 951 bp, synthetic construct
  source 1..951: mol_type = other DNA; note = HA-NLS-DCAF1-(GS)1-3DX.1 nucleic acid
atgtacccatacgatgttccagattacgctccggcggcgaaacgcgtgaaactggatggcagcggcagcggcagccaggcgccgattaactttaccagccgcctgaaccgccgcgcgagctttccgaaatatggcggcgtggatggcggctgctttgatcgccatctgatttttagccgcggcagcgaagtgaaactggtggaaagcggcggcgatctggtgaaaccgggcggcagcctgaaactgagctgcgcggcgagcggctttacctttagccattatggcatgagctgggtgcgccagaccccggataaacgcctggaatgggtggcgaccattggcagccgcggcacctatacccattatccggatagcgtgaaaggccgctttaccattagccgcgataacgataaaaacgcgctgtatctgcagatgaacagcctgcgcaccgaagataccgcgatgtattattgcgcgcgcaaaagcgaattttattattatggcaacacctattattatagcgcgatggattattggggccagggcgcgagcgtgaccgtgagcagcggcggcggcggcagcggcggcggcgatagcggcggcggcggcagcgatattgtgctgacccagagcccggcgagcctggcggtgagcctgggccagcgcgcgaccattagctgccgcgcgagcgaaagcgtggataactatggctttagctttatgaactggtttcagcagaaaccgggccagccgccgaaactgctgatttatgcgaccagcaaccgcggcagcggcgtgccggcgcgctttagcggcagcggcagcggcaccgattttagcctgaacattcatccggtggaagaagatgatagcgcgatgtatttttgccagcagaccaaagaagtgccgtggacctttggcggcggcaccaaactggaaattaaacgctaa

SEQ ID NO: 1207 - DNA, 957 bp, synthetic construct
  source 1..957: mol_type = other DNA; note = HA-NLS-DCAF1-(GS)2-3DX.1 nucleic acid
atgtacccatacgatgttccagattacgctccggcggcgaaacgcgtgaaactggatggcagcggcagcggcagccaggcgccgattaactttaccagccgcctgaaccgccgcgcgagctttccgaaatatggcggcgtggatggcggctgctttgatcgccatctgatttttagccgcggcagcggcagcgaagtgaaactggtggaaagcggcggcgatctggtgaaaccgggcggcagcctgaaactgagctgcgcggcgagcggctttacctttagccattatggcatgagctgggtgcgccagaccccggataaacgcctggaatgggtggcgaccattggcagccgcggcacctatacccattatccggatagcgtgaaaggccgctttaccattagccgcgataacgataaaaacgcgctgtatctgcagatgaacagcctgcgcaccgaagataccgcgatgtattattgcgcgcgcaaaagcgaattttattattatggcaacacctattattatagcgcgatggattattggggccagggcgcgagcgtgaccgtgagcagcggcggcggcggcagcggcggcggcgatagcggcggcggcggcagcgatattgtgctgacccagagcccggcgagcctggcggtgagcctgggccagcgcgcgaccattagctgccgcgcgagcgaaagcgtggataactatggctttagctttatgaactggtttcagcagaaaccgggccagccgccgaaactgctgatttatgcgaccagcaaccgcggcagcggcgtgccggcgcgctttagcggcagcggcagcggcaccgattttagcctgaacattcatccggtggaagaagatgatagcgcgatgtatttttgccagcagaccaaagaagtgccgtggacctttggcggcggcaccaaactggaaattaaacgctaa

SEQ ID NO: 1208 - DNA, 963 bp, synthetic construct
  source 1..963: mol_type = other DNA; note = HA-NLS-DCAF1-(GS)3-3DX.1 nucleic acid
atgtacccatacgatgttccagattacgctccggcggcgaaacgcgtgaaactggatggcagcggcagcggcagccaggcgccgattaactttaccagccgcctgaaccgccgcgcgagctttccgaaatatggcggcgtggatggcggctgctttgatcgccatctgatttttagccgcggcagcggcagcggcagcgaagtgaaactggtggaaagcggcggcgatctggtgaaaccgggcggcagcctgaaactgagctgcgcggcgagcggctttacctttagccattatggcatgagctgggtgcgccagaccccggataaacgcctggaatgggtggcgaccattggcagccgcggcacctatacccattatccggatagcgtgaaaggccgctttaccattagccgcgataacgataaaaacgcgctgtatctgcagatgaacagcctgcgcaccgaagataccgcgatgtattattgcgcgcgcaaaagcgaattttattattatggcaacacctattattatagcgcgatggattattggggccagggcgcgagcgtgaccgtgagcagcggcggcggcggcagcggcggcggcgatagcggcggcggcggcagcgatattgtgctgacccagagcccggcgagcctggcggtgagcctgggccagcgcgcgaccattagctgccgcgcgagcgaaagcgtggataactatggctttagctttatgaactggtttcagcagaaaccgggccagccgccgaaactgctgatttatgcgaccagcaaccgcggcagcggcgtgccggcgcgctttagcggcagcggcagcggcaccgattttagcctgaacattcatccggtggaagaagatgatagcgcgatgtatttttgccagcagaccaaagaagtgccgtggacctttggcggcggcaccaaactggaaattaaacgctaa

SEQ ID NO: 1209 - DNA, 969 bp, synthetic construct
  source 1..969: mol_type = other DNA; note = HA-NLS-DCAF1-(GS)4-3DX.1 nucleic acid
atgtacccatacgatgttccagattacgctccggcggcgaaacgcgtgaaactggatggcagcggcagcggcagccaggcgccgattaactttaccagccgcctgaaccgccgcgcgagctttccgaaatatggcggcgtggatggcggctgctttgatcgccatctgatttttagccgcggcagcggcagcggcagcggcagcgaagtgaaactggtggaaagcggcggcgatctggtgaaaccgggcggcagcctgaaactgagctgcgcggcgagcggctttacctttagccattatggcatgagctgggtgcgccagaccccggataaacgcctggaatgggtggcgaccattggcagccgcggcacctatacccattatccggatagcgtgaaaggccgctttaccattagccgcgataacgataaaaacgcgctgtatctgcagatgaacagcctgcgcaccgaagataccgcgatgtattattgcgcgcgcaaaagcgaattttattattatggcaacacctattattatagcgcgatggattattggggccagggcgcgagcgtgaccgtgagcagcggcggcggcggcagcggcggcggcgatagcggcggcggcggcagcgatattgtgctgacccagagcccggcgagcctggcggtgagcctgggccagcgcgcgaccattagctgccgcgcgagcgaaagcgtggataactatggctttagctttatgaactggtttcagcagaaaccgggccagccgccgaaactgctgatttatgcgaccagcaaccgcggcagcggcgtgccggcgcgctttagcggcagcggcagcggcaccgattttagcctgaacattcatccggtggaagaagatgatagcgcgatgtatttttgccagcagaccaaagaagtgccgtggacctttggcggcggcaccaaactggaaattaaacgctaa

SEQ ID NO: 1210 - DNA, 975 bp, synthetic construct
  source 1..975: mol_type = other DNA; note = HA-NLS-DCAF1-(GS)5-3DX.1 nucleic acid
atgtacccatacgatgttccagattacgctccggcggcgaaacgcgtgaaactggatggcagcggcagcggcagccaggcgccgattaactttaccagccgcctgaaccgccgcgcgagctttccgaaatatggcggcgtggatggcggctgctttgatcgccatctgatttttagccgcggcagcggcagcggcagcggcagcggcagcgaagtgaaactggtggaaagcggcggcgatctggtgaaaccgggcggcagcctgaaactgagctgcgcggcgagcggctttacctttagccattatggcatgagctgggtgcgccagaccccggataaacgcctggaatgggtggcgaccattggcagccgcggcacctatacccattatccggatagcgtgaaaggccgctttaccattagccgcgataacgataaaaacgcgctgtatctgcagatgaacagcctgcgcaccgaagataccgcgatgtattattgcgcgcgcaaaagcgaattttattattatggcaacacctattattatagcgcgatggattattggggccagggcgcgagcgtgaccgtgagcagcggcggcggcggcagcggcggcggcgatagcggcggcggcggcagcgatattgtgctgacccagagcccggcgagcctggcggtgagcctgggccagcgcgcgaccattagctgccgcgcgagcgaaagcgtggataactatggctttagctttatgaactggtttcagcagaaaccgggccagccgccgaaactgctgatttatgcgaccagcaaccgcggcagcggcgtgccggcgcgctttagcggcagcggcagcggcaccgattttagcctgaacattcatccggtggaagaagatgatagcgcgatgtatttttgccagcagaccaaagaagtgccgtggacctttggcggcggcaccaaactggaaattaaacgctaa

SEQ ID NO: 1211 - DNA, 981 bp, synthetic construct
  source 1..981: mol_type = other DNA; note = HA-NLS-DCAF1-(GS)6-3DX.1 nucleic acid
atgtacccatacgatgttccagattacgctccggcggcgaaacgcgtgaaactggatggcagcggcagcggcagccaggcgccgattaactttaccagccgcctgaaccgccgcgcgagctttccgaaatatggcggcgtggatggcggctgctttgatcgccatctgatttttagccgcggcagcggcagcggcagcggcagcggcagcggcagcgaagtgaaactggtggaaagcggcggcgatctggtgaaaccgggcggcagcctgaaactgagctgcgcggcgagcggctttacctttagccattatggcatgagctgggtgcgccagaccccggataaacgcctggaatgggtggcgaccattggcagccgcggcacctatacccattatccggatagcgtgaaaggccgctttaccattagccgcgataacgataaaaacgcgctgtatctgcagatgaacagcctgcgcaccgaagataccgcgatgtattattgcgcgcgcaaaagcgaattttattattatggcaacacctattattatagcgcgatggattattggggccagggcgcgagcgtgaccgtgagcagcggcggcggcggcagcggcggcggcgatagcggcggcggcggcagcgatattgtgctgacccagagcccggcgagcctggcggtgagcctgggccagcgcgcgaccattagctgccgcgcgagcgaaagcgtggataactatggctttagctttatgaactggtttcagcagaaaccgggccagccgccgaaactgctgatttatgcgaccagcaaccgcggcagcggcgtgccggcgcgctttagcggcagcggcagcggcaccgattttagcctgaacattcatccggtggaagaagatgatagcgcgatgtatttttgccagcagaccaaagaagtgccgtggacctttggcggcggcaccaaactggaaattaaacgctaa

SEQ ID NO: 1212 - DNA, 1884 bp, synthetic construct
  source 1..1884: mol_type = other DNA; note = NLS-3DX.1-(GS)1-E6AP nucleic acid
ccggcggcgaaacgcgtgaaactggatggcagcggcagcggcagcgaagtgaaactggtggaaagcggcggcgatctggtgaaaccgggcggcagcctgaaactgagctgcgcggcgagcggctttacctttagccattatggcatgagctgggtgcgccagaccccggataaacgcctggaatgggtggcgaccattggcagccgcggcacctatacccattatccggatagcgtgaaaggccgctttaccattagccgcgataacgataaaaacgcgctgtatctgcagatgaacagcctgcgcaccgaagataccgcgatgtattattgcgcgcgcaaaagcgaattttattattatggcaacacctattattatagcgcgatggattattggggccagggcgcgagcgtgaccgtgagcagcggcggcggcggcagcggcggcggcgatagcggcggcggcggcagcgatattgtgctgacccagagcccggcgagcctggcggtgagcctgggccagcgcgcgaccattagctgccgcgcgagcgaaagcgtggataactatggctttagctttatgaactggtttcagcagaaaccgggccagccgccgaaactgctgatttatgcgaccagcaaccgcggcagcggcgtgccggcgcgctttagcggcagcggcagcggcaccgattttagcctgaacattcatccggtggaagaagatgatagcgcgatgtatttttgccagcagaccaaagaagtgccgtggacctttggcggcggcaccaaactggaaattaaacgcggcagcaatccatatttgagactcaaagttagacgtgaccatatcatagatgatgcacttgtccggctagagatgatcgctatggaaaatcctgcagacttgaagaagcagttgtatgtggaatttgaaggagaacaaggagttgatgagggaggtgtttccaaagaattttttcagctggttgtggaggaaatcttcaatccagatattggtatgttcacatacgatgaatctacaaaattgttttggtttaatccatcttcttttgaaactgagggtcagtttactctgattggcatagtactgggtctggctatttacaataactgtatactggatgtacattttcccatggttgtctacaggaagctaatggggaaaaaaggaacttttcgtgacttgggagactctcacccagttctatatcagagtttaaaagatttattggagtatgaagggaatgtggaagatgacatgatgatcactttccagatatcacagacagatctttttggtaacccaatgatgtatgatctaaaggaaaatggtgataaaattccaattacaaatgaaaacaggaaggaatttgtcaatctttattctgactacattctcaataaatcagtagaaaaacagttcaaggcttttcggagaggttttcatatggtgaccaatgaatctcccttaaagtacttattcagaccagaagaaattgaattgcttatatgtggaagccggaatctagatttccaagcactagaagaaactacagaatatgacggtggctataccagggactctgttctgattagggagttctgggaaatcgttcattcatttacagatgaacagaaaagactcttcttgcagtttacaacgggcacagacagagcacctgtgggaggactaggaaaattaaagatgattatagccaaaaatggcccagacacagaaaggttacctacatctcatacttgctttaatgtgcttttacttccggaatactcaagcaaagaaaaacttaaagagagattgttgaaggccatcacgtatgccaaaggatttggcatgctgtaa

SEQ ID NO: 1213 - DNA, 1890 bp, synthetic construct
  source 1..1890: mol_type = other DNA; note = NLS-3DX.1-(GS)2-E6AP nucleic acid
ccggcggcgaaacgcgtgaaactggatggcagcggcagcggcagcgaagtgaaactggtggaaagcggcggcgatctggtgaaaccgggcggcagcctgaaactgagctgcgcggcgagcggctttacctttagccattatggcatgagctgggtgcgccagaccccggataaacgcctggaatgggtggcgaccattggcagccgcggcacctatacccattatccggatagcgtgaaaggccgctttaccattagccgcgataacgataaaaacgcgctgtatctgcagatgaacagcctgcgcaccgaagataccgcgatgtattattgcgcgcgcaaaagcgaattttattattatggcaacacctattattatagcgcgatggattattggggccagggcgcgagcgtgaccgtgagcagcggcggcggcggcagcggcggcggcgatagcggcggcggcggcagcgatattgtgctgacccagagcccggcgagcctggcggtgagcctgggccagcgcgcgaccattagctgccgcgcgagcgaaagcgtggataactatggctttagctttatgaactggtttcagcagaaaccgggccagccgccgaaactgctgatttatgcgaccagcaaccgcggcagcggcgtgccggcgcgctttagcggcagcggcagcggcaccgattttagcctgaacattcatccggtggaagaagatgatagcgcgatgtatttttgccagcagaccaaagaagtgccgtggacctttggcggcggcaccaaactggaaattaaacgcggcagcggcagcaatccatatttgagactcaaagttagacgtgaccatatcatagatgatgcacttgtccggctagagatgatcgctatggaaaatcctgcagacttgaagaagcagttgtatgtggaatttgaaggagaacaaggagttgatgagggaggtgtttccaaagaattttttcagctggttgtggaggaaatcttcaatccagatattggtatgttcacatacgatgaatctacaaaattgttttggtttaatccatcttcttttgaaactgagggtcagtttactctgattggcatagtactgggtctggctatttacaataactgtatactggatgtacattttcccatggttgtctacaggaagctaatggggaaaaaaggaacttttcgtgacttgggagactctcacccagttctatatcagagtttaaaagatttattggagtatgaagggaatgtggaagatgacatgatgatcactttccagatatcacagacagatctttttggtaacccaatgatgtatgatctaaaggaaaatggtgataaaattccaattacaaatgaaaacaggaaggaatttgtcaatctttattctgactacattctcaataaatcagtagaaaaacagttcaaggcttttcggagaggttttcatatggtgaccaatgaatctcccttaaagtacttattcagaccagaagaaattgaattgcttatatgtggaagccggaatctagatttccaagcactagaagaaactacagaatatgacggtggctataccagggactctgttctgattagggagttctgggaaatcgttcattcatttacagatgaacagaaaagactcttcttgcagtttacaacgggcacagacagagcacctgtgggaggactaggaaaattaaagatgattatagccaaaaatggcccagacacagaaaggttacctacatctcatacttgctttaatgtgcttttacttccggaatactcaagcaaagaaaaacttaaagagagattgttgaaggccatcacgtatgccaaaggatttggcatgctgtaa

SEQ ID NO: 1214 - DNA, 1896 bp, synthetic construct
  source 1..1896: mol_type = other DNA; note = NLS-3DX.1-(GS)3-E6AP nucleic acid
ccggcggcgaaacgcgtgaaactggatggcagcggcagcggcagcgaagtgaaactggtggaaagcggcggcgatctggtgaaaccgggcggcagcctgaaactgagctgcgcggcgagcggctttacctttagccattatggcatgagctgggtgcgccagaccccggataaacgcctggaatgggtggcgaccattggcagccgcggcacctatacccattatccggatagcgtgaaaggccgctttaccattagccgcgataacgataaaaacgcgctgtatctgcagatgaacagcctgcgcaccgaagataccgcgatgtattattgcgcgcgcaaaagcgaattttattattatggcaacacctattattatagcgcgatggattattggggccagggcgcgagcgtgaccgtgagcagcggcggcggcggcagcggcggcggcgatagcggcggcggcggcagcgatattgtgctgacccagagcccggcgagcctggcggtgagcctgggccagcgcgcgaccattagctgccgcgcgagcgaaagcgtggataactatggctttagctttatgaactggtttcagcagaaaccgggccagccgccgaaactgctgatttatgcgaccagcaaccgcggcagcggcgtgccggcgcgctttagcggcagcggcagcggcaccgattttagcctgaacattcatccggtggaagaagatgatagcgcgatgtatttttgccagcagaccaaagaagtgccgtggacctttggcggcggcaccaaactggaaattaaacgcggcagcggcagcggcagcaatccatatttgagactcaaagttagacgtgaccatatcatagatgatgcacttgtccggctagagatgatcgctatggaaaatcctgcagacttgaagaagcagttgtatgtggaatttgaaggagaacaaggagttgatgagggaggtgtttccaaagaattttttcagctggttgtggaggaaatcttcaatccagatattggtatgttcacatacgatgaatctacaaaattgttttggtttaatccatcttcttttgaaactgagggtcagtttactctgattggcatagtactgggtctggctatttacaataactgtatactggatgtacattttcccatggttgtctacaggaagctaatggggaaaaaaggaacttttcgtgacttgggagactctcacccagttctatatcagagtttaaaagatttattggagtatgaagggaatgtggaagatgacatgatgatcactttccagatatcacagacagatctttttggtaacccaatgatgtatgatctaaaggaaaatggtgataaaattccaattacaaatgaaaacaggaaggaatttgtcaatctttattctgactacattctcaataaatcagtagaaaaacagttcaaggcttttcggagaggttttcatatggtgaccaatgaatctcccttaaagtacttattcagaccagaagaaattgaattgcttatatgtggaagccggaatctagatttccaagcactagaagaaactacagaatatgacggtggctataccagggactctgttctgattagggagttctgggaaatcgttcattcatttacagatgaacagaaaagactcttcttgcagtttacaacgggcacagacagagcacctgtgggaggactaggaaaattaaagatgattatagccaaaaatggcccagacacagaaaggttacctacatctcatacttgctttaatgtgcttttacttccggaatactcaagcaaagaaaaacttaaagagagattgttgaaggccatcacgtatgccaaaggatttggcatgctgtaa

SEQ ID NO: 1215 - DNA, 1902 bp, synthetic construct
  source 1..1902: mol_type = other DNA; note = NLS-3DX.1-(GS)4-E6AP nucleic acid
ccggcggcgaaacgcgtgaaactggatggcagcggcagcggcagcgaagtgaaactggtggaaagcggcggcgatctggtgaaaccgggcggcagcctgaaactgagctgcgcggcgagcggctttacctttagccattatggcatgagctgggtgcgccagaccccggataaacgcctggaatgggtggcgaccattggcagccgcggcacctatacccattatccggatagcgtgaaaggccgctttaccattagccgcgataacgataaaaacgcgctgtatctgcagatgaacagcctgcgcaccgaagataccgcgatgtattattgcgcgcgcaaaagcgaattttattattatggcaacacctattattatagcgcgatggattattggggccagggcgcgagcgtgaccgtgagcagcggcggcggcggcagcggcggcggcgatagcggcggcggcggcagcgatattgtgctgacccagagcccggcgagcctggcggtgagcctgggccagcgcgcgaccattagctgccgcgcgagcgaaagcgtggataactatggctttagctttatgaactggtttcagcagaaaccgggccagccgccgaaactgctgatttatgcgaccagcaaccgcggcagcggcgtgccggcgcgctttagcggcagcggcagcggcaccgattttagcctgaacattcatccggtggaagaagatgatagcgcgatgtatttttgccagcagaccaaagaagtgccgtggacctttggcggcggcaccaaactggaaattaaacgcggcagcggcagcggcagcggcagcaatccatatttgagactcaaagttagacgtgaccatatcatagatgatgcacttgtccggctagagatgatcgctatggaaaatcctgcagacttgaagaagcagttgtatgtggaatttgaaggagaacaaggagttgatgagggaggtgtttccaaagaattttttcagctggttgtggaggaaatcttcaatccagatattggtatgttcacatacgatgaatctacaaaattgttttggtttaatccatcttcttttgaaactgagggtcagtttactctgattggcatagtactgggtctggctatttacaataactgtatactggatgtacattttcccatggttgtctacaggaagctaatggggaaaaaaggaacttttcgtgacttgggagactctcacccagttctatatcagagtttaaaagatttattggagtatgaagggaatgtggaagatgacatgatgatcactttccagatatcacagacagatctttttggtaacccaatgatgtatgatctaaaggaaaatggtgataaaattccaattacaaatgaaaacaggaaggaatttgtcaatctttattctgactacattctcaataaatcagtagaaaaacagttcaaggcttttcggagaggttttcatatggtgaccaatgaatctcccttaaagtacttattcagaccagaagaaattgaattgcttatatgtggaagccggaatctagatttccaagcactagaagaaactacagaatatgacggtggctataccagggactctgttctgattagggagttctgggaaatcgttcattcatttacagatgaacagaaaagactcttcttgcagtttacaacgggcacagacagagcacctgtgggaggactaggaaaattaaagatgattatagccaaaaatggcccagacacagaaaggttacctacatctcatacttgctttaatgtgcttttacttccggaatactcaagcaaagaaaaacttaaagagagattgttgaaggccatcacgtatgccaaaggatttggcatgctgtaa

SEQ ID NO: 1216 - DNA, 1908 bp, synthetic construct
  source 1..1908: mol_type = other DNA; note = NLS-3DX.1-(GS)5-E6AP nucleic acid
ccggcggcgaaacgcgtgaaactggatggcagcggcagcggcagcgaagtgaaactggtggaaagcggcggcgatctggtgaaaccgggcggcagcctgaaactgagctgcgcggcgagcggctttacctttagccattatggcatgagctgggtgcgccagaccccggataaacgcctggaatgggtggcgaccattggcagccgcggcacctatacccattatccggatagcgtgaaaggccgctttaccattagccgcgataacgataaaaacgcgctgtatctgcagatgaacagcctgcgcaccgaagataccgcgatgtattattgcgcgcgcaaaagcgaattttattattatggcaacacctattattatagcgcgatggattattggggccagggcgcgagcgtgaccgtgagcagcggcggcggcggcagcggcggcggcgatagcggcggcggcggcagcgatattgtgctgacccagagcccggcgagcctggcggtgagcctgggccagcgcgcgaccattagctgccgcgcgagcgaaagcgtggataactatggctttagctttatgaactggtttcagcagaaaccgggccagccgccgaaactgctgatttatgcgaccagcaaccgcggcagcggcgtgccggcgcgctttagcggcagcggcagcggcaccgattttagcctgaacattcatccggtggaagaagatgatagcgcgatgtatttttgccagcagaccaaagaagtgccgtggacctttggcggcggcaccaaactggaaattaaacgcggcagcggcagcggcagcggcagcggcagcaatccatatttgagactcaaagttagacgtgaccatatcatagatgatgcacttgtccggctagagatgatcgctatggaaaatcctgcagacttgaagaagcagttgtatgtggaatttgaaggagaacaaggagttgatgagggaggtgtttccaaagaattttttcagctggttgtggaggaaatcttcaatccagatattggtatgttcacatacgatgaatctacaaaattgttttggtttaatccatcttcttttgaaactgagggtcagtttactctgattggcatagtactgggtctggctatttacaataactgtatactggatgtacattttcccatggttgtctacaggaagctaatggggaaaaaaggaacttttcgtgacttgggagactctcacccagttctatatcagagtttaaaagatttattggagtatgaagggaatgtggaagatgacatgatgatcactttccagatatcacagacagatctttttggtaacccaatgatgtatgatctaaaggaaaatggtgataaaattccaattacaaatgaaaacaggaaggaatttgtcaatctttattctgactacattctcaataaatcagtagaaaaacagttcaaggcttttcggagaggttttcatatggtgaccaatgaatctcccttaaagtacttattcagaccagaagaaattgaattgcttatatgtggaagccggaatctagatttccaagcactagaagaaactacagaatatgacggtggctataccagggactctgttctgattagggagttctgggaaatcgttcattcatttacagatgaacagaaaagactcttcttgcagtttacaacgggcacagacagagcacctgtgggaggactaggaaaattaaagatgattatagccaaaaatggcccagacacagaaaggttacctacatctcatacttgctttaatgtgcttttacttccggaatactcaagcaaagaaaaacttaaagagagattgttgaaggccatcacgtatgccaaaggatttggcatgctgtaa

SEQ ID NO: 1217 - DNA, 1914 bp, synthetic construct
  source 1..1914: mol_type = other DNA; note = NLS-3DX.1-(GS)6-E6AP nucleic acid
ccggcggcgaaacgcgtgaaactggatggcagcggcagcggcagcgaagtgaaactggtggaaagcggcggcgatctggtgaaaccgggcggcagcctgaaactgagctgcgcggcgagcggctttacctttagccattatggcatgagctgggtgcgccagaccccggataaacgcctggaatgggtggcgaccattggcagccgcggcacctatacccattatccggatagcgtgaaaggccgctttaccattagccgcgataacgataaaaacgcgctgtatctgcagatgaacagcctgcgcaccgaagataccgcgatgtattattgcgcgcgcaaaagcgaattttattattatggcaacacctattattatagcgcgatggattattggggccagggcgcgagcgtgaccgtgagcagcggcggcggcggcagcggcggcggcgatagcggcggcggcggcagcgatattgtgctgacccagagcccggcgagcctggcggtgagcctgggccagcgcgcgaccattagctgccgcgcgagcgaaagcgtggataactatggctttagctttatgaactggtttcagcagaaaccgggccagccgccgaaactgctgatttatgcgaccagcaaccgcggcagcggcgtgccggcgcgctttagcggcagcggcagcggcaccgattttagcctgaacattcatccggtggaagaagatgatagcgcgatgtatttttgccagcagaccaaagaagtgccgtggacctttggcggcggcaccaaactggaaattaaacgcggcagcggcagcggcagcggcagcggcagcggcagcaatccatatttgagactcaaagttagacgtgaccatatcatagatgatgcacttgtccggctagagatgatcgctatggaaaatcctgcagacttgaagaagcagttgtatgtggaatttgaaggagaacaaggagttgatgagggaggtgtttccaaagaattttttcagctggttgtggaggaaatcttcaatccagatattggtatgttcacatacgatgaatctacaaaattgttttggtttaatccatcttcttttgaaactgagggtcagtttactctgattggcatagtactgggtctggctatttacaataactgtatactggatgtacattttcccatggttgtctacaggaagctaatggggaaaaaaggaacttttcgtgacttgggagactctcacccagttctatatcagagtttaaaagatttattggagtatgaagggaatgtggaagatgacatgatgatcactttccagatatcacagacagatctttttggtaacccaatgatgtatgatctaaaggaaaatggtgataaaattccaattacaaatgaaaacaggaaggaatttgtcaatctttattctgactacattctcaataaatcagtagaaaaacagttcaaggcttttcggagaggttttcatatggtgaccaatgaatctcccttaaagtacttattcagaccagaagaaattgaattgcttatatgtggaagccggaatctagatttccaagcactagaagaaactacagaatatgacggtggctataccagggactctgttctgattagggagttctgggaaatcgttcattcatttacagatgaacagaaaagactcttcttgcagtttacaacgggcacagacagagcacctgtgggaggactaggaaaattaaagatgattatagccaaaaatggcccagacacagaaaggttacctacatctcatacttgctttaatgtgcttttacttccggaatactcaagcaaagaaaaacttaaagagagattgttgaaggccatcacgtatgccaaaggatttggcatgctgtaa

SEQ ID NO: 1218 - DNA, 1914 bp, synthetic construct
  source 1..1914: mol_type = other DNA; note = HA-NLS-3DX.1-(GS)1-E6AP nucleic acid
atgtacccatacgatgttccagattacgctccggcggcgaaacgcgtgaaactggatggcagcggcagcggcagcgaagtgaaactggtggaaagcggcggcgatctggtgaaaccgggcggcagcctgaaactgagctgcgcggcgagcggctttacctttagccattatggcatgagctgggtgcgccagaccccggataaacgcctggaatgggtggcgaccattggcagccgcggcacctatacccattatccggatagcgtgaaaggccgctttaccattagccgcgataacgataaaaacgcgctgtatctgcagatgaacagcctgcgcaccgaagataccgcgatgtattattgcgcgcgcaaaagcgaattttattattatggcaacacctattattatagcgcgatggattattggggccagggcgcgagcgtgaccgtgagcagcggcggcggcggcagcggcggcggcgatagcggcggcggcggcagcgatattgtgctgacccagagcccggcgagcctggcggtgagcctgggccagcgcgcgaccattagctgccgcgcgagcgaaagcgtggataactatggctttagctttatgaactggtttcagcagaaaccgggccagccgccgaaactgctgatttatgcgaccagcaaccgcggcagcggcgtgccggcgcgctttagcggcagcggcagcggcaccgattttagcctgaacattcatccggtggaagaagatgatagcgcgatgtatttttgccagcagaccaaagaagtgccgtggacctttggcggcggcaccaaactggaaattaaacgcggcagcaatccatatttgagactcaaagttagacgtgaccatatcatagatgatgcacttgtccggctagagatgatcgctatggaaaatcctgcagacttgaagaagcagttgtatgtggaatttgaaggagaacaaggagttgatgagggaggtgtttccaaagaattttttcagctggttgtggaggaaatcttcaatccagatattggtatgttcacatacgatgaatctacaaaattgttttggtttaatccatcttcttttgaaactgagggtcagtttactctgattggcatagtactgggtctggctatttacaataactgtatactggatgtacattttcccatggttgtctacaggaagctaatggggaaaaaaggaacttttcgtgacttgggagactctcacccagttctatatcagagtttaaaagatttattggagtatgaagggaatgtggaagatgacatgatgatcactttccagatatcacagacagatctttttggtaacccaatgatgtatgatctaaaggaaaatggtgataaaattccaattacaaatgaaaacaggaaggaatttgtcaatctttattctgactacattctcaataaatcagtagaaaaacagttcaaggcttttcggagaggttttcatatggtgaccaatgaatctcccttaaagtacttattcagaccagaagaaattgaattgcttatatgtggaagccggaatctagatttccaagcactagaagaaactacagaatatgacggtggctataccagggactctgttctgattagggagttctgggaaatcgttcattcatttacagatgaacagaaaagactcttcttgcagtttacaacgggcacagacagagcacctgtgggaggactaggaaaattaaagatgattatagccaaaaatggcccagacacagaaaggttacctacatctcatacttgctttaatgtgcttttacttccggaatactcaagcaaagaaaaacttaaagagagattgttgaaggccatcacgtatgccaaaggatttggcatgctgtaa

SEQ ID NO: 1219 - DNA, 1920 bp, synthetic construct
  source 1..1920: mol_type = other DNA; note = HA-NLS-3DX.1-(GS)2-E6AP nucleic acid
atgtacccatacgatgttccagattacgctccggcggcgaaacgcgtgaaactggatggcagcggcagcggcagcgaagtgaaactggtggaaagcggcggcgatctggtgaaaccgggcggcagcctgaaactgagctgcgcggcgagcggctttacctttagccattatggcatgagctgggtgcgccagaccccggataaacgcctggaatgggtggcgaccattggcagccgcggcacctatacccattatccggatagcgtgaaaggccgctttaccattagccgcgataacgataaaaacgcgctgtatctgcagatgaacagcctgcgcaccgaagataccgcgatgtattattgcgcgcgcaaaagcgaattttattattatggcaacacctattattatagcgcgatggattattggggccagggcgcgagcgtgaccgtgagcagcggcggcggcggcagcggcggcggcgatagcggcggcggcggcagcgatattgtgctgacccagagcccggcgagcctggcggtgagcctgggccagcgcgcgaccattagctgccgcgcgagcgaaagcgtggataactatggctttagctttatgaactggtttcagcagaaaccgggccagccgccgaaactgctgatttatgcgaccagcaaccgcggcagcggcgtgccggcgcgctttagcggcagcggcagcggcaccgattttagcctgaacattcatccggtggaagaagatgatagcgcgatgtatttttgccagcagaccaaagaagtgccgtggacctttggcggcggcaccaaactggaaattaaacgcggcagcggcagcaatccatatttgagactcaaagttagacgtgaccatatcatagatgatgcacttgtccggctagagatgatcgctatggaaaatcctgcagacttgaagaagcagttgtatgtggaatttgaaggagaacaaggagttgatgagggaggtgtttccaaagaattttttcagctggttgtggaggaaatcttcaatccagatattggtatgttcacatacgatgaatctacaaaattgttttggtttaatccatcttcttttgaaactgagggtcagtttactctgattggcatagtactgggtctggctatttacaataactgtatactggatgtacattttcccatggttgtctacaggaagctaatggggaaaaaaggaacttttcgtgacttgggagactctcacccagttctatatcagagtttaaaagatttattggagtatgaagggaatgtggaagatgacatgatgatcactttccagatatcacagacagatctttttggtaacccaatgatgtatgatctaaaggaaaatggtgataaaattccaattacaaatgaaaacaggaaggaatttgtcaatctttattctgactacattctcaataaatcagtagaaaaacagttcaaggcttttcggagaggttttcatatggtgaccaatgaatctcccttaaagtacttattcagaccagaagaaattgaattgcttatatgtggaagccggaatctagatttccaagcactagaagaaactacagaatatgacggtggctataccagggactctgttctgattagggagttctgggaaatcgttcattcatttacagatgaacagaaaagactcttcttgcagtttacaacgggcacagacagagcacctgtgggaggactaggaaaattaaagatgattatagccaaaaatggcccagacacagaaaggttacctacatctcatacttgctttaatgtgcttttacttccggaatactcaagcaaagaaaaacttaaagagagattgttgaaggccatcacgtatgccaaaggatttggcatgctgtaa

SEQ ID NO: 1220 - DNA, 1926 bp, synthetic construct
  source 1..1926: mol_type = other DNA; note = HA-NLS-3DX.1-(GS)3-E6AP nucleic acid
atgtacccatacgatgttccagattacgctccggcggcgaaacgcgtgaaactggatggcagcggcagcggcagcgaagtgaaactggtggaaagcggcggcgatctggtgaaaccgggcggcagcctgaaactgagctgcgcggcgagcggctttacctttagccattatggcatgagctgggtgcgccagaccccggataaacgcctggaatgggtggcgaccattggcagccgcggcacctatacccattatccggatagcgtgaaaggccgctttaccattagccgcgataacgataaaaacgcgctgtatctgcagatgaacagcctgcgcaccgaagataccgcgatgtattattgcgcgcgcaaaagcgaattttattattatggcaacacctattattatagcgcgatggattattggggccagggcgcgagcgtgaccgtgagcagcggcggcggcggcagcggcggcggcgatagcggcggcggcggcagcgatattgtgctgacccagagcccggcgagcctggcggtgagcctgggccagcgcgcgaccattagctgccgcgcgagcgaaagcgtggataactatggctttagctttatgaactggtttcagcagaaaccgggccagccgccgaaactgctgatttatgcgaccagcaaccgcggcagcggcgtgccggcgcgctttagcggcagcggcagcggcaccgattttagcctgaacattcatccggtggaagaagatgatagcgcgatgtatttttgccagcagaccaaagaagtgccgtggacctttggcggcggcaccaaactggaaattaaacgcggcagcggcagcggcagcaatccatatttgagactcaaagttagacgtgaccatatcatagatgatgcacttgtccggctagagatgatcgctatggaaaatcctgcagacttgaagaagcagttgtatgtggaatttgaaggagaacaaggagttgatgagggaggtgtttccaaagaattttttcagctggttgtggaggaaatcttcaatccagatattggtatgttcacatacgatgaatctacaaaattgttttggtttaatccatcttcttttgaaactgagggtcagtttactctgattggcatagtactgggtctggctatttacaataactgtatactggatgtacattttcccatggttgtctacaggaagctaatggggaaaaaaggaacttttcgtgacttgggagactctcacccagttctatatcagagtttaaaagatttattggagtatgaagggaatgtggaagatgacatgatgatcactttccagatatcacagacagatctttttggtaacccaatgatgtatgatctaaaggaaaatggtgataaaattccaattacaaatgaaaacaggaaggaatttgtcaatctttattctgactacattctcaataaatcagtagaaaaacagttcaaggcttttcggagaggttttcatatggtgaccaatgaatctcccttaaagtacttattcagaccagaagaaattgaattgcttatatgtggaagccggaatctagatttccaagcactagaagaaactacagaatatgacggtggctataccagggactctgttctgattagggagttctgggaaatcgttcattcatttacagatgaacagaaaagactcttcttgcagtttacaacgggcacagacagagcacctgtgggaggactaggaaaattaaagatgattatagccaaaaatggcccagacacagaaaggttacctacatctcatacttgctttaatgtgcttttacttccggaatactcaagcaaagaaaaacttaaagagagattgttgaaggccatcacgtatgccaaaggatttggcatgctgtaa

SEQ ID NO: 1221 - DNA, 1932 bp, synthetic construct
  source 1..1932: mol_type = other DNA; note = HA-NLS-3DX.1-(GS)4-E6AP nucleic acid
atgtacccatacgatgttccagattacgctccggcggcgaaacgcgtgaaactggatggcagcggcagcggcagcgaagtgaaactggtggaaagcggcggcgatctggtgaaaccgggcggcagcctgaaactgagctgcgcggcgagcggctttacctttagccattatggcatgagctgggtgcgccagaccccggataaacgcctggaatgggtggcgaccattggcagccgcggcacctatacccattatccggatagcgtgaaaggccgctttaccattagccgcgataacgataaaaacgcgctgtatctgcagatgaacagcctgcgcaccgaagataccgcgatgtattattgcgcgcgcaaaagcgaattttattattatggcaacacctattattatagcgcgatggattattggggccagggcgcgagcgtgaccgtgagcagcggcggcggcggcagcggcggcggcgatagcggcggcggcggcagcgatattgtgctgacccagagcccggcgagcctggcggtgagcctgggccagcgcgcgaccattagctgccgcgcgagcgaaagcgtggataactatggctttagctttatgaactggtttcagcagaaaccgggccagccgccgaaactgctgatttatgcgaccagcaaccgcggcagcggcgtgccggcgcgctttagcggcagcggcagcggcaccgattttagcctgaacattcatccggtggaagaagatgatagcgcgatgtatttttgccagcagaccaaagaagtgccgtggacctttggcggcggcaccaaactggaaattaaacgcggcagcggcagcggcagcggcagcaatccatatttgagactcaaagttagacgtgaccatatcatagatgatgcacttgtccggctagagatgatcgctatggaaaatcctgcagacttgaagaagcagttgtatgtggaatttgaaggagaacaaggagttgatgagggaggtgtttccaaagaattttttcagctggttgtggaggaaatcttcaatccagatattggtatgttcacatacgatgaatctacaaaattgttttggtttaatccatcttcttttgaaactgagggtcagtttactctgattggcatagtactgggtctggctatttacaataactgtatactggatgtacattttcccatggttgtctacaggaagctaatggggaaaaaaggaacttttcgtgacttgggagactctcacccagttctatatcagagtttaaaagatttattggagtatgaagggaatgtggaagatgacatgatgatcactttccagatatcacagacagatctttttggtaacccaatgatgtatgatctaaaggaaaatggtgataaaattccaattacaaatgaaaacaggaaggaatttgtcaatctttattctgactacattctcaataaatcagtagaaaaacagttcaaggcttttcggagaggttttcatatggtgaccaatgaatctcccttaaagtacttattcagaccagaagaaattgaattgcttatatgtggaagccggaatctagatttccaagcactagaagaaactacagaatatgacggtggctataccagggactctgttctgattagggagttctgggaaatcgttcattcatttacagatgaacagaaaagactcttcttgcagtttacaacgggcacagacagagcacctgtgggaggactaggaaaattaaagatgattatagccaaaaatggcccagacacagaaaggttacctacatctcatacttgctttaatgtgcttttacttccggaatactcaagcaaagaaaaacttaaagagagattgttgaaggccatcacgtatgccaaaggatttggcatgctgtaa

SEQ ID NO: 1222 - DNA, 1938 bp, synthetic construct
  source 1..1938: mol_type = other DNA; note = HA-NLS-3DX.1-(GS)5-E6AP nucleic acid
atgtacccatacgatgttccagattacgctccggcggcgaaacgcgtgaaactggatggcagcggcagcggcagcgaagtgaaactggtggaaagcggcggcgatctggtgaaaccgggcggcagcctgaaactgagctgcgcggcgagcggctttacctttagccattatggcatgagctgggtgcgccagaccccggataaacgcctggaatgggtggcgaccattggcagccgcggcacctatacccattatccggatagcgtgaaaggccgctttaccattagccgcgataacgataaaaacgcgctgtatctgcagatgaacagcctgcgcaccgaagataccgcgatgtattattgcgcgcgcaaaagcgaattttattattatggcaacacctattattatagcgcgatggattattggggccagggcgcgagcgtgaccgtgagcagcggcggcggcggcagcggcggcggcgatagcggcggcggcggcagcgatattgtgctgacccagagcccggcgagcctggcggtgagcctgggccagcgcgcgaccattagctgccgcgcgagcgaaagcgtggataactatggctttagctttatgaactggtttcagcagaaaccgggccagccgccgaaactgctgatttatgcgaccagcaaccgcggcagcggcgtgccggcgcgctttagcggcagcggcagcggcaccgattttagcctgaacattcatccggtggaagaagatgatagcgcgatgtatttttgccagcagaccaaagaagtgccgtggacctttggcggcggcaccaaactggaaattaaacgcggcagcggcagcggcagcggcagcggcagcaatccatatttgagactcaaagttagacgtgaccatatcatagatgatgcacttgtccggctagagatgatcgctatggaaaatcctgcagacttgaagaagcagttgtatgtggaatttgaaggagaacaaggagttgatgagggaggtgtttccaaagaattttttcagctggttgtggaggaaatcttcaatccagatattggtatgttcacatacgatgaatctacaaaattgttttggtttaatccatcttcttttgaaactgagggtcagtttactctgattggcatagtactgggtctggctatttacaataactgtatactggatgtacattttcccatggttgtctacaggaagctaatggggaaaaaaggaacttttcgtgacttgggagactctcacccagttctatatcagagtttaaaagatttattggagtatgaagggaatgtggaagatgacatgatgatcactttccagatatcacagacagatctttttggtaacccaatgatgtatgatctaaaggaaaatggtgataaaattccaattacaaatgaaaacaggaaggaatttgtcaatctttattctgactacattctcaataaatcagtagaaaaacagttcaaggcttttcggagaggttttcatatggtgaccaatgaatctcccttaaagtacttattcagaccagaagaaattgaattgcttatatgtggaagccggaatctagatttccaagcactagaagaaactacagaatatgacggtggctataccagggactctgttctgattagggagttctgggaaatcgttcattcatttacagatgaacagaaaagactcttcttgcagtttacaacgggcacagacagagcacctgtgggaggactaggaaaattaaagatgattatagccaaaaatggcccagacacagaaaggttacctacatctcatacttgctttaatgtgcttttacttccggaatactcaagcaaagaaaaacttaaagagagattgttgaaggccatcacgtatgccaaaggatttggcatgctgtaa

SEQ ID NO: 1223 - DNA, 1944 bp, synthetic construct
  source 1..1944: mol_type = other DNA; note = HA-NLS-3DX.1-(GS)6-E6AP nucleic acid
atgtacccatacgatgttccagattacgctccggcggcgaaacgcgtgaaactggatggcagcggcagcggcagcgaagtgaaactggtggaaagcggcggcgatctggtgaaaccgggcggcagcctgaaactgagctgcgcggcgagcggctttacctttagccattatggcatgagctgggtgcgccagaccccggataaacgcctggaatgggtggcgaccattggcagccgcggcacctatacccattatccggatagcgtgaaaggccgctttaccattagccgcgataacgataaaaacgcgctgtatctgcagatgaacagcctgcgcaccgaagataccgcgatgtattattgcgcgcgcaaaagcgaattttattattatggcaacacctattattatagcgcgatggattattggggccagggcgcgagcgtgaccgtgagcagcggcggcggcggcagcggcggcggcgatagcggcggcggcggcagcgatattgtgctgacccagagcccggcgagcctggcggtgagcctgggccagcgcgcgaccattagctgccgcgcgagcgaaagcgtggataactatggctttagctttatgaactggtttcagcagaaaccgggccagccgccgaaactgctgatttatgcgaccagcaaccgcggcagcggcgtgccggcgcgctttagcggcagcggcagcggcaccgattttagcctgaacattcatccggtggaagaagatgatagcgcgatgtatttttgccagcagaccaaagaagtgccgtggacctttggcggcggcaccaaactggaaattaaacgcggcagcggcagcggcagcggcagcggcagcggcagcaatccatatttgagactcaaagttagacgtgaccatatcatagatgatgcacttgtccggctagagatgatcgctatggaaaatcctgcagacttgaagaagcagttgtatgtggaatttgaaggagaacaaggagttgatgagggaggtgtttccaaagaattttttcagctggttgtggaggaaatcttcaatccagatattggtatgttcacatacgatgaatctacaaaattgttttggtttaatccatcttcttttgaaactgagggtcagtttactctgattggcatagtactgggtctggctatttacaataactgtatactggatgtacattttcccatggttgtctacaggaagctaatggggaaaaaaggaacttttcgtgacttgggagactctcacccagttctatatcagagtttaaaagatttattggagtatgaagggaatgtggaagatgacatgatgatcactttccagatatcacagacagatctttttggtaacccaatgatgtatgatctaaaggaaaatggtgataaaattccaattacaaatgaaaacaggaaggaatttgtcaatctttattctgactacattctcaataaatcagtagaaaaacagttcaaggcttttcggagaggttttcatatggtgaccaatgaatctcccttaaagtacttattcagaccagaagaaattgaattgcttatatgtggaagccggaatctagatttccaagcactagaagaaactacagaatatgacggtggctataccagggactctgttctgattagggagttctgggaaatcgttcattcatttacagatgaacagaaaagactcttcttgcagtttacaacgggcacagacagagcacctgtgggaggactaggaaaattaaagatgattatagccaaaaatggcccagacacagaaaggttacctacatctcatacttgctttaatgtgcttttacttccggaatactcaagcaaagaaaaacttaaagagagattgttgaaggccatcacgtatgccaaaggatttggcatgctgtaa

SEQ ID NO: 1224 - DNA, 1872 bp, synthetic construct
  source 1..1872: mol_type = other DNA; note = FBXW7a-(GS)1-3DX.1 nucleic acid
aatcaggaactgctctctgtgggcagcaaaagacgacgaactggaggctctctgagaggtaacccttcctcaagccaggtagatgaagaacagatgaatcgtgtggtagaggaggaacagcaacagcaactcagacaacaagaggaggagcacactgcaaggaatggtgaagttgttggagtagaacctagacctggaggccaaaatgattcccagcaaggacagttggaagaaaacaataatagatttatttcggtagatgaggactcctcaggaaaccaagaagaacaagaggaagatgaagaacatgctggtgaacaagatgaggaggatgaggaggaggaggagatggaccaggagagtgacgattttgatcagtctgatgatagtagcagagaagatgaacatacacatactaacagtgtcacgaactccagtagtattgtggacctgcccgttcaccaactctcctccccattctatacaaaaacaacaaaaatgaaaagaaagttggaccatggttctgaggtccgctctttttctttgggaaagaaaccatgcaaagtctcagaatatacaagtaccactgggcttgtaccatgttcagcaacaccaacaacttttggggacctcagagcagccaatggccaagggcaacaacgacgccgaattacatctgtccagccacctacaggcctccaggaatggctaaaaatgtttcagagctggagtggaccagagaaattgcttgctttagatgaactcattgatagttgtgaaccaacacaagtaaaacatatgatgcaagtgatagaaccccagtttcaacgagacttcatttcattgctccctaaagagttggcactctatgtgctttcattcctggaacccaaagacctgctacaagcagctcagacatgtcgctactggagaattttggctgaagacaaccttctctggagagagaaatgcaaagaagaggggattgatgaaccattgcacatcaagagaagaaaagtaataaaaccaggtttcatacacagtccatggaaaagtgcatacatcagacagcacagaattgatactaactcgaggcgaggaggcagcgaagtgaaactggtggaaagcggcggcgatctggtgaaaccgggcggcagcctgaaactgagctgcgcggcgagcggctttacctttagccattatggcatgagctgggtgcgccagaccccggataaacgcctggaatgggtggcgaccattggcagccgcggcacctatacccattatccggatagcgtgaaaggccgctttaccattagccgcgataacgataaaaacgcgctgtatctgcagatgaacagcctgcgcaccgaagataccgcgatgtattattgcgcgcgcaaaagcgaattttattattatggcaacacctattattatagcgcgatggattattggggccagggcgcgagcgtgaccgtgagcagcggcggcggcggcagcggcggcggcgatagcggcggcggcggcagcgatattgtgctgacccagagcccggcgagcctggcggtgagcctgggccagcgcgcgaccattagctgccgcgcgagcgaaagcgtggataactatggctttagctttatgaactggtttcagcagaaaccgggccagccgccgaaactgctgatttatgcgaccagcaaccgcggcagcggcgtgccggcgcgctttagcggcagcggcagcggcaccgattttagcctgaacattcatccggtggaagaagatgatagcgcgatgtatttttgccagcagaccaaagaagtgccgtggacctttggcggcggcaccaaactggaaattaaacgctaa

SEQ ID NO: 1225 - DNA, 1878 bp, synthetic construct
  source 1..1878: mol_type = other DNA; note = FBXW7a-(GS)2-3DX.1 nucleic acid
aatcaggaactgctctctgtgggcagcaaaagacgacgaactggaggctctctgagaggtaacccttcctcaagccaggtagatgaagaacagatgaatcgtgtggtagaggaggaacagcaacagcaactcagacaacaagaggaggagcacactgcaaggaatggtgaagttgttggagtagaacctagacctggaggccaaaatgattcccagcaaggacagttggaagaaaacaataatagatttatttcggtagatgaggactcctcaggaaaccaagaagaacaagaggaagatgaagaacatgctggtgaacaagatgaggaggatgaggaggaggaggagatggaccaggagagtgacgattttgatcagtctgatgatagtagcagagaagatgaacatacacatactaacagtgtcacgaactccagtagtattgtggacctgcccgttcaccaactctcctccccattctatacaaaaacaacaaaaatgaaaagaaagttggaccatggttctgaggtccgctctttttctttgggaaagaaaccatgcaaagtctcagaatatacaagtaccactgggcttgtaccatgttcagcaacaccaacaacttttggggacctcagagcagccaatggccaagggcaacaacgacgccgaattacatctgtccagccacctacaggcctccaggaatggctaaaaatgtttcagagctggagtggaccagagaaattgcttgctttagatgaactcattgatagttgtgaaccaacacaagtaaaacatatgatgcaagtgatagaaccccagtttcaacgagacttcatttcattgctccctaaagagttggcactctatgtgctttcattcctggaacccaaagacctgctacaagcagctcagacatgtcgctactggagaattttggctgaagacaaccttctctggagagagaaatgcaaagaagaggggattgatgaaccattgcacatcaagagaagaaaagtaataaaaccaggtttcatacacagtccatggaaaagtgcatacatcagacagcacagaattgatactaactcgaggcgaggaggcagcggcagcgaagtgaaactggtggaaagcggcggcgatctggtgaaaccgggcggcagcctgaaactgagctgcgcggcgagcggctttacctttagccattatggcatgagctgggtgcgccagaccccggataaacgcctggaatgggtggcgaccattggcagccgcggcacctatacccattatccggatagcgtgaaaggccgctttaccattagccgcgataacgataaaaacgcgctgtatctgcagatgaacagcctgcgcaccgaagataccgcgatgtattattgcgcgcgcaaaagcgaattttattattatggcaacacctattattatagcgcgatggattattggggccagggcgcgagcgtgaccgtgagcagcggcggcggcggcagcggcggcggcgatagcggcggcggcggcagcgatattgtgctgacccagagcccggcgagcctggcggtgagcctgggccagcgcgcgaccattagctgccgcgcgagcgaaagcgtggataactatggctttagctttatgaactggtttcagcagaaaccgggccagccgccgaaactgctgatttatgcgaccagcaaccgcggcagcggcgtgccggcgcgctttagcggcagcggcagcggcaccgattttagcctgaacattcatccggtggaagaagatgatagcgcgatgtatttttgccagcagaccaaagaagtgccgtggacctttggcggcggcaccaaactggaaattaaacgctaa

SEQ ID NO: 1226 - DNA, 1884 bp, synthetic construct
  source 1..1884: mol_type = other DNA; note = FBXW7a-(GS)3-3DX.1 nucleic acid
aatcaggaactgctctctgtgggcagcaaaagacgacgaactggaggctctctgagaggtaacccttcctcaagccaggtagatgaagaacagatgaatcgtgtggtagaggaggaacagcaacagcaactcagacaacaagaggaggagcacactgcaaggaatggtgaagttgttggagtagaacctagacctggaggccaaaatgattcccagcaaggacagttggaagaaaacaataatagatttatttcggtagatgaggactcctcaggaaaccaagaagaacaagaggaagatgaagaacatgctggtgaacaagatgaggaggatgaggaggaggaggagatggaccaggagagtgacgattttgatcagtctgatgatagtagcagagaagatgaacatacacatactaacagtgtcacgaactccagtagtattgtggacctgcccgttcaccaactctcctccccattctatacaaaaacaacaaaaatgaaaagaaagttggaccatggttctgaggtccgctctttttctttgggaaagaaaccatgcaaagtctcagaatatacaagtaccactgggcttgtaccatgttcagcaacaccaacaacttttggggacctcagagcagccaatggccaagggcaacaacgacgccgaattacatctgtccagccacctacaggcctccaggaatggctaaaaatgtttcagagctggagtggaccagagaaattgcttgctttagatgaactcattgatagttgtgaaccaacacaagtaaaacatatgatgcaagtgatagaaccccagtttcaacgagacttcatttcattgctccctaaagagttggcactctatgtgctttcattcctggaacccaaagacctgctacaagcagctcagacatgtcgctactggagaattttggctgaagacaaccttctctggagagagaaatgcaaagaagaggggattgatgaaccattgcacatcaagagaagaaaagtaataaaaccaggtttcatacacagtccatggaaaagtgcatacatcagacagcacagaattgatactaactcgaggcgaggaggcagcggcagcggcagcgaagtgaaactggtggaaagcggcggcgatctggtgaaaccgggcggcagcctgaaactgagctgcgcggcgagcggctttacctttagccattatggcatgagctgggtgcgccagaccccggataaacgcctggaatgggtggcgaccattggcagccgcggcacctatacccattatccggatagcgtgaaaggccgctttaccattagccgcgataacgataaaaacgcgctgtatctgcagatgaacagcctgcgcaccgaagataccgcgatgtattattgcgcgcgcaaaagcgaattttattattatggcaacacctattattatagcgcgatggattattggggccagggcgcgagcgtgaccgtgagcagcggcggcggcggcagcggcggcggcgatagcggcggcggcggcagcgatattgtgctgacccagagcccggcgagcctggcggtgagcctgggccagcgcgcgaccattagctgccgcgcgagcgaaagcgtggataactatggctttagctttatgaactggtttcagcagaaaccgggccagccgccgaaactgctgatttatgcgaccagcaaccgcggcagcggcgtgccggcgcgctttagcggcagcggcagcggcaccgattttagcctgaacattcatccggtggaagaagatgatagcgcgatgtatttttgccagcagaccaaagaagtgccgtggacctttggcggcggcaccaaactggaaattaaacgctaa

SEQ ID NO: 1227 - DNA, 1890 bp, synthetic construct
  source 1..1890: mol_type = other DNA; note = FBXW7a-(GS)4-3DX.1 nucleic acid
aatcaggaactgctctctgtgggcagcaaaagacgacgaactggaggctctctgagaggtaacccttcctcaagccaggtagatgaagaacagatgaatcgtgtggtagaggaggaacagcaacagcaactcagacaacaagaggaggagcacactgcaaggaatggtgaagttgttggagtagaacctagacctggaggccaaaatgattcccagcaaggacagttggaagaaaacaataatagatttatttcggtagatgaggactcctcaggaaaccaagaagaacaagaggaagatgaagaacatgctggtgaacaagatgaggaggatgaggaggaggaggagatggaccaggagagtgacgattttgatcagtctgatgatagtagcagagaagatgaacatacacatactaacagtgtcacgaactccagtagtattgtggacctgcccgttcaccaactctcctccccattctatacaaaaacaacaaaaatgaaaagaaagttggaccatggttctgaggtccgctctttttctttgggaaagaaaccatgcaaagtctcagaatatacaagtaccactgggcttgtaccatgttcagcaacaccaacaacttttggggacctcagagcagccaatggccaagggcaacaacgacgccgaattacatctgtccagccacctacaggcctccaggaatggctaaaaatgtttcagagctggagtggaccagagaaattgcttgctttagatgaactcattgatagttgtgaaccaacacaagtaaaacatatgatgcaagtgatagaaccccagtttcaacgagacttcatttcattgctccctaaagagttggcactctatgtgctttcattcctggaacccaaagacctgctacaagcagctcagacatgtcgctactggagaattttggctgaagacaaccttctctggagagagaaatgcaaagaagaggggattgatgaaccattgcacatcaagagaagaaaagtaataaaaccaggtttcatacacagtccatggaaaagtgcatacatcagacagcacagaattgatactaactcgaggcgaggaggcagcggcagcggcagcggcagcgaagtgaaactggtggaaagcggcggcgatctggtgaaaccgggcggcagcctgaaactgagctgcgcggcgagcggctttacctttagccattatggcatgagctgggtgcgccagaccccggataaacgcctggaatgggtggcgaccattggcagccgcggcacctatacccattatccggatagcgtgaaaggccgctttaccattagccgcgataacgataaaaacgcgctgtatctgcagatgaacagcctgcgcaccgaagataccgcgatgtattattgcgcgcgcaaaagcgaattttattattatggcaacacctattattatagcgcgatggattattggggccagggcgcgagcgtgaccgtgagcagcggcggcggcggcagcggcggcggcgatagcggcggcggcggcagcgatattgtgctgacccagagcccggcgagcctggcggtgagcctgggccagcgcgcgaccattagctgccgcgcgagcgaaagcgtggataactatggctttagctttatgaactggtttcagcagaaaccgggccagccgccgaaactgctgatttatgcgaccagcaaccgcggcagcggcgtgccggcgcgctttagcggcagcggcagcggcaccgattttagcctgaacattcatccggtggaagaagatgatagcgcgatgtatttttgccagcagaccaaagaagtgccgtggacctttggcggcggcaccaaactggaaattaaacgctaa

SEQ ID NO: 1228 - DNA, 1896 bp, synthetic construct
  source 1..1896: mol_type = other DNA; note = FBXW7a-(GS)5-3DX.1 nucleic acid
aatcaggaactgctctctgtgggcagcaaaagacgacgaactggaggctctctgagaggtaacccttcctcaagccaggtagatgaagaacagatgaatcgtgtggtagaggaggaacagcaacagcaactcagacaacaagaggaggagcacactgcaaggaatggtgaagttgttggagtagaacctagacctggaggccaaaatgattcccagcaaggacagttggaagaaaacaataatagatttatttcggtagatgaggactcctcaggaaaccaagaagaacaagaggaagatgaagaacatgctggtgaacaagatgaggaggatgaggaggaggaggagatggaccaggagagtgacgattttgatcagtctgatgatagtagcagagaagatgaacatacacatactaacagtgtcacgaactccagtagtattgtggacctgcccgttcaccaactctcctccccattctatacaaaaacaacaaaaatgaaaagaaagttggaccatggttctgaggtccgctctttttctttgggaaagaaaccatgcaaagtctcagaatatacaagtaccactgggcttgtaccatgttcagcaacaccaacaacttttggggacctcagagcagccaatggccaagggcaacaacgacgccgaattacatctgtccagccacctacaggcctccaggaatggctaaaaatgtttcagagctggagtggaccagagaaattgcttgctttagatgaactcattgatagttgtgaaccaacacaagtaaaacatatgatgcaagtgatagaaccccagtttcaacgagacttcatttcattgctccctaaagagttggcactctatgtgctttcattcctggaacccaaagacctgctacaagcagctcagacatgtcgctactggagaattttggctgaagacaaccttctctggagagagaaatgcaaagaagaggggattgatgaaccattgcacatcaagagaagaaaagtaataaaaccaggtttcatacacagtccatggaaaagtgcatacatcagacagcacagaattgatactaactcgaggcgaggaggcagcggcagcggcagcggcagcggcagcgaagtgaaactggtggaaagcggcggcgatctggtgaaaccgggcggcagcctgaaactgagctgcgcggcgagcggctttacctttagccattatggcatgagctgggtgcgccagaccccggataaacgcctggaatgggtggcgaccattggcagccgcggcacctatacccattatccggatagcgtgaaaggccgctttaccattagccgcgataacgataaaaacgcgctgtatctgcagatgaacagcctgcgcaccgaagataccgcgatgtattattgcgcgcgcaaaagcgaattttattattatggcaacacctattattatagcgcgatggattattggggccagggcgcgagcgtgaccgtgagcagcggcggcggcggcagcggcggcggcgatagcggcggcggcggcagcgatattgtgctgacccagagcccggcgagcctggcggtgagcctgggccagcgcgcgaccattagctgccgcgcgagcgaaagcgtggataactatggctttagctttatgaactggtttcagcagaaaccgggccagccgccgaaactgctgatttatgcgaccagcaaccgcggcagcggcgtgccggcgcgctttagcggcagcggcagcggcaccgattttagcctgaacattcatccggtggaagaagatgatagcgcgatgtatttttgccagcagaccaaagaagtgccgtggacctttggcggcggcaccaaactggaaattaaacgctaa

SEQ ID NO: 1229 - DNA, 1902 bp, synthetic construct
  source 1..1902: mol_type = other DNA; note = FBXW7a-(GS)6-3DX.1 nucleic acid
aatcaggaactgctctctgtgggcagcaaaagacgacgaactggaggctctctgagaggtaacccttcctcaagccaggtagatgaagaacagatgaatcgtgtggtagaggaggaacagcaacagcaactcagacaacaagaggaggagcacactgcaaggaatggtgaagttgttggagtagaacctagacctggaggccaaaatgattcccagcaaggacagttggaagaaaacaataatagatttatttcggtagatgaggactcctcaggaaaccaagaagaacaagaggaagatgaagaacatgctggtgaacaagatgaggaggatgaggaggaggaggagatggaccaggagagtgacgattttgatcagtctgatgatagtagcagagaagatgaacatacacatactaacagtgtcacgaactccagtagtattgtggacctgcccgttcaccaactctcctccccattctatacaaaaacaacaaaaatgaaaagaaagttggaccatggttctgaggtccgctctttttctttgggaaagaaaccatgcaaagtctcagaatatacaagtaccactgggcttgtaccatgttcagcaacaccaacaacttttggggacctcagagcagccaatggccaagggcaacaacgacgccgaattacatctgtccagccacctacaggcctccaggaatggctaaaaatgtttcagagctggagtggaccagagaaattgcttgctttagatgaactcattgatagttgtgaaccaacacaagtaaaacatatgatgcaagtgatagaaccccagtttcaacgagacttcatttcattgctccctaaagagttggcactctatgtgctttcattcctggaacccaaagacctgctacaagcagctcagacatgtcgctactggagaattttggctgaagacaaccttctctggagagagaaatgcaaagaagaggggattgatgaaccattgcacatcaagagaagaaaagtaataaaaccaggtttcatacacagtccatggaaaagtgcatacatcagacagcacagaattgatactaactcgaggcgaggaggcagcggcagcggcagcggcagcggcagcggcagcgaagtgaaactggtggaaagcggcggcgatctggtgaaaccgggcggcagcctgaaactgagctgcgcggcgagcggctttacctttagccattatggcatgagctgggtgcgccagaccccggataaacgcctggaatgggtggcgaccattggcagccgcggcacctatacccattatccggatagcgtgaaaggccgctttaccattagccgcgataacgataaaaacgcgctgtatctgcagatgaacagcctgcgcaccgaagataccgcgatgtattattgcgcgcgcaaaagcgaattttattattatggcaacacctattattatagcgcgatggattattggggccagggcgcgagcgtgaccgtgagcagcggcggcggcggcagcggcggcggcgatagcggcggcggcggcagcgatattgtgctgacccagagcccggcgagcctggcggtgagcctgggccagcgcgcgaccattagctgccgcgcgagcgaaagcgtggataactatggctttagctttatgaactggtttcagcagaaaccgggccagccgccgaaactgctgatttatgcgaccagcaaccgcggcagcggcgtgccggcgcgctttagcggcagcggcagcggcaccgattttagcctgaacattcatccggtggaagaagatgatagcgcgatgtatttttgccagcagaccaaagaagtgccgtggacctttggcggcggcaccaaactggaaattaaacgctaa

SEQ ID NO: 1230 - DNA, 1902 bp, synthetic construct
  source 1..1902: mol_type = other DNA; note = HA-FBXW7a-(GS)1-3DX.1 nucleic acid
atgtacccatacgatgttccagattacgctaatcaggaactgctctctgtgggcagcaaaagacgacgaactggaggctctctgagaggtaacccttcctcaagccaggtagatgaagaacagatgaatcgtgtggtagaggaggaacagcaacagcaactcagacaacaagaggaggagcacactgcaaggaatggtgaagttgttggagtagaacctagacctggaggccaaaatgattcccagcaaggacagttggaagaaaacaataatagatttatttcggtagatgaggactcctcaggaaaccaagaagaacaagaggaagatgaagaacatgctggtgaacaagatgaggaggatgaggaggaggaggagatggaccaggagagtgacgattttgatcagtctgatgatagtagcagagaagatgaacatacacatactaacagtgtcacgaactccagtagtattgtggacctgcccgttcaccaactctcctccccattctatacaaaaacaacaaaaatgaaaagaaagttggaccatggttctgaggtccgctctttttctttgggaaagaaaccatgcaaagtctcagaatatacaagtaccactgggcttgtaccatgttcagcaacaccaacaacttttggggacctcagagcagccaatggccaagggcaacaacgacgccgaattacatctgtccagccacctacaggcctccaggaatggctaaaaatgtttcagagctggagtggaccagagaaattgcttgctttagatgaactcattgatagttgtgaaccaacacaagtaaaacatatgatgcaagtgatagaaccccagtttcaacgagacttcatttcattgctccctaaagagttggcactctatgtgctttcattcctggaacccaaagacctgctacaagcagctcagacatgtcgctactggagaattttggctgaagacaaccttctctggagagagaaatgcaaagaagaggggattgatgaaccattgcacatcaagagaagaaaagtaataaaaccaggtttcatacacagtccatggaaaagtgcatacatcagacagcacagaattgatactaactcgaggcgaggaggcagcgaagtgaaactggtggaaagcggcggcgatctggtgaaaccgggcggcagcctgaaactgagctgcgcggcgagcggctttacctttagccattatggcatgagctgggtgcgccagaccccggataaacgcctggaatgggtggcgaccattggcagccgcggcacctatacccattatccggatagcgtgaaaggccgctttaccattagccgcgataacgataaaaacgcgctgtatctgcagatgaacagcctgcgcaccgaagataccgcgatgtattattgcgcgcgcaaaagcgaattttattattatggcaacacctattattatagcgcgatggattattggggccagggcgcgagcgtgaccgtgagcagcggcggcggcggcagcggcggcggcgatagcggcggcggcggcagcgatattgtgctgacccagagcccggcgagcctggcggtgagcctgggccagcgcgcgaccattagctgccgcgcgagcgaaagcgtggataactatggctttagctttatgaactggtttcagcagaaaccgggccagccgccgaaactgctgatttatgcgaccagcaaccgcggcagcggcgtgccggcgcgctttagcggcagcggcagcggcaccgattttagcctgaacattcatccggtggaagaagatgatagcgcgatgtatttttgccagcagaccaaagaagtgccgtggacctttggcggcggcaccaaactggaaattaaacgctaa

SEQ ID NO: 1231 - DNA, 1908 bp, synthetic construct
  source 1..1908: mol_type = other DNA; note = HA-FBXW7a-(GS)2-3DX.1 nucleic acid
atgtacccatacgatgttccagattacgctaatcaggaactgctctctgtgggcagcaaaagacgacgaactggaggctctctgagaggtaacccttcctcaagccaggtagatgaagaacagatgaatcgtgtggtagaggaggaacagcaacagcaactcagacaacaagaggaggagcacactgcaaggaatggtgaagttgttggagtagaacctagacctggaggccaaaatgattcccagcaaggacagttggaagaaaacaataatagatttatttcggtagatgaggactcctcaggaaaccaagaagaacaagaggaagatgaagaacatgctggtgaacaagatgaggaggatgaggaggaggaggagatggaccaggagagtgacgattttgatcagtctgatgatagtagcagagaagatgaacatacacatactaacagtgtcacgaactccagtagtattgtggacctgcccgttcaccaactctcctccccattctatacaaaaacaacaaaaatgaaaagaaagttggaccatggttctgaggtccgctctttttctttgggaaagaaaccatgcaaagtctcagaatatacaagtaccactgggcttgtaccatgttcagcaacaccaacaacttttggggacctcagagcagccaatggccaagggcaacaacgacgccgaattacatctgtccagccacctacaggcctccaggaatggctaaaaatgtttcagagctggagtggaccagagaaattgcttgctttagatgaactcattgatagttgtgaaccaacacaagtaaaacatatgatgcaagtgatagaaccccagtttcaacgagacttcatttcattgctccctaaagagttggcactctatgtgctttcattcctggaacccaaagacctgctacaagcagctcagacatgtcgctactggagaattttggctgaagacaaccttctctggagagagaaatgcaaagaagaggggattgatgaaccattgcacatcaagagaagaaaagtaataaaaccaggtttcatacacagtccatggaaaagtgcatacatcagacagcacagaattgatactaactcgaggcgaggaggcagcggcagcgaagtgaaactggtggaaagcggcggcgatctggtgaaaccgggcggcagcctgaaactgagctgcgcggcgagcggctttacctttagccattatggcatgagctgggtgcgccagaccccggataaacgcctggaatgggtggcgaccattggcagccgcggcacctatacccattatccggatagcgtgaaaggccgctttaccattagccgcgataacgataaaaacgcgctgtatctgcagatgaacagcctgcgcaccgaagataccgcgatgtattattgcgcgcgcaaaagcgaattttattattatggcaacacctattattatagcgcgatggattattggggccagggcgcgagcgtgaccgtgagcagcggcggcggcggcagcggcggcggcgatagcggcggcggcggcagcgatattgtgctgacccagagcccggcgagcctggcggtgagcctgggccagcgcgcgaccattagctgccgcgcgagcgaaagcgtggataactatggctttagctttatgaactggtttcagcagaaaccgggccagccgccgaaactgctgatttatgcgaccagcaaccgcggcagcggcgtgccggcgcgctttagcggcagcggcagcggcaccgattttagcctgaacattcatccggtggaagaagatgatagcgcgatgtatttttgccagcagaccaaagaagtgccgtggacctttggcggcggcaccaaactggaaattaaacgctaa

SEQ ID NO: 1232 - DNA, 1914 bp, synthetic construct
  source 1..1914: mol_type = other DNA; note = HA-FBXW7a-(GS)3-3DX.1 nucleic acid
atgtacccatacgatgttccagattacgctaatcaggaactgctctctgtgggcagcaaaagacgacgaactggaggctctctgagaggtaacccttcctcaagccaggtagatgaagaacagatgaatcgtgtggtagaggaggaacagcaacagcaactcagacaacaagaggaggagcacactgcaaggaatggtgaagttgttggagtagaacctagacctggaggccaaaatgattcccagcaaggacagttggaagaaaacaataatagatttatttcggtagatgaggactcctcaggaaaccaagaagaacaagaggaagatgaagaacatgctggtgaacaagatgaggaggatgaggaggaggaggagatggaccaggagagtgacgattttgatcagtctgatgatagtagcagagaagatgaacatacacatactaacagtgtcacgaactccagtagtattgtggacctgcccgttcaccaactctcctccccattctatacaaaaacaacaaaaatgaaaagaaagttggaccatggttctgaggtccgctctttttctttgggaaagaaaccatgcaaagtctcagaatatacaagtaccactgggcttgtaccatgttcagcaacaccaacaacttttggggacctcagagcagccaatggccaagggcaacaacgacgccgaattacatctgtccagccacctacaggcctccaggaatggctaaaaatgtttcagagctggagtggaccagagaaattgcttgctttagatgaactcattgatagttgtgaaccaacacaagtaaaacatatgatgcaagtgatagaaccccagtttcaacgagacttcatttcattgctccctaaagagttggcactctatgtgctttcattcctggaacccaaagacctgctacaagcagctcagacatgtcgctactggagaattttggctgaagacaaccttctctggagagagaaatgcaaagaagaggggattgatgaaccattgcacatcaagagaagaaaagtaataaaaccaggtttcatacacagtccatggaaaagtgcatacatcagacagcacagaattgatactaactcgaggcgaggaggcagcggcagcggcagcgaagtgaaactggtggaaagcggcggcgatctggtgaaaccgggcggcagcctgaaactgagctgcgcggcgagcggctttacctttagccattatggcatgagctgggtgcgccagaccccggataaacgcctggaatgggtggcgaccattggcagccgcggcacctatacccattatccggatagcgtgaaaggccgctttaccattagccgcgataacgataaaaacgcgctgtatctgcagatgaacagcctgcgcaccgaagataccgcgatgtattattgcgcgcgcaaaagcgaattttattattatggcaacacctattattatagcgcgatggattattggggccagggcgcgagcgtgaccgtgagcagcggcggcggcggcagcggcggcggcgatagcggcggcggcggcagcgatattgtgctgacccagagcccggcgagcctggcggtgagcctgggccagcgcgcgaccattagctgccgcgcgagcgaaagcgtggataactatggctttagctttatgaactggtttcagcagaaaccgggccagccgccgaaactgctgatttatgcgaccagcaaccgcggcagcggcgtgccggcgcgctttagcggcagcggcagcggcaccgattttagcctgaacattcatccggtggaagaagatgatagcgcgatgtatttttgccagcagaccaaagaagtgccgtggacctttggcggcggcaccaaactggaaattaaacgctaa

SEQ ID NO: 1233 - DNA, 1920 bp, synthetic construct
  source 1..1920: mol_type = other DNA; note = HA-FBXW7a-(GS)4-3DX.1 nucleic acid
atgtacccatacgatgttccagattacgctaatcaggaactgctctctgtgggcagcaaaagacgacgaactggaggctctctgagaggtaacccttcctcaagccaggtagatgaagaacagatgaatcgtgtggtagaggaggaacagcaacagcaactcagacaacaagaggaggagcacactgcaaggaatggtgaagttgttggagtagaacctagacctggaggccaaaatgattcccagcaaggacagttggaagaaaacaataatagatttatttcggtagatgaggactcctcaggaaaccaagaagaacaagaggaagatgaagaacatgctggtgaacaagatgaggaggatgaggaggaggaggagatggaccaggagagtgacgattttgatcagtctgatgatagtagcagagaagatgaacatacacatactaacagtgtcacgaactccagtagtattgtggacctgcccgttcaccaactctcctccccattctatacaaaaacaacaaaaatgaaaagaaagttggaccatggttctgaggtccgctctttttctttgggaaagaaaccatgcaaagtctcagaatatacaagtaccactgggcttgtaccatgttcagcaacaccaacaacttttggggacctcagagcagccaatggccaagggcaacaacgacgccgaattacatctgtccagccacctacaggcctccaggaatggctaaaaatgtttcagagctggagtggaccagagaaattgcttgctttagatgaactcattgatagttgtgaaccaacacaagtaaaacatatgatgcaagtgatagaaccccagtttcaacgagacttcatttcattgctccctaaagagttggcactctatgtgctttcattcctggaacccaaagacctgctacaagcagctcagacatgtcgctactggagaattttggctgaagacaaccttctctggagagagaaatgcaaagaagaggggattgatgaaccattgcacatcaagagaagaaaagtaataaaaccaggtttcatacacagtccatggaaaagtgcatacatcagacagcacagaattgatactaactcgaggcgaggaggcagcggcagcggcagcggcagcgaagtgaaactggtggaaagcggcggcgatctggtgaaaccgggcggcagcctgaaactgagctgcgcggcgagcggctttacctttagccattatggcatgagctgggtgcgccagaccccggataaacgcctggaatgggtggcgaccattggcagccgcggcacctatacccattatccggatagcgtgaaaggccgctttaccattagccgcgataacgataaaaacgcgctgtatctgcagatgaacagcctgcgcaccgaagataccgcgatgtattattgcgcgcgcaaaagcgaattttattattatggcaacacctattattatagcgcgatggattattggggccagggcgcgagcgtgaccgtgagcagcggcggcggcggcagcggcggcggcgatagcggcggcggcggcagcgatattgtgctgacccagagcccggcgagcctggcggtgagcctgggccagcgcgcgaccattagctgccgcgcgagcgaaagcgtggataactatggctttagctttatgaactggtttcagcagaaaccgggccagccgccgaaactgctgatttatgcgaccagcaaccgcggcagcggcgtgccggcgcgctttagcggcagcggcagcggcaccgattttagcctgaacattcatccggtggaagaagatgatagcgcgatgtatttttgccagcagaccaaagaagtgccgtggacctttggcggcggcaccaaactggaaattaaacgctaa

SEQ ID NO: 1234 - DNA, 1926 bp, synthetic construct
  source 1..1926: mol_type = other DNA; note = HA-FBXW7a-(GS)5-3DX.1 nucleic acid
atgtacccatacgatgttccagattacgctaatcaggaactgctctctgtgggcagcaaaagacgacgaactggaggctctctgagaggtaacccttcctcaagccaggtagatgaagaacagatgaatcgtgtggtagaggaggaacagcaacagcaactcagacaacaagaggaggagcacactgcaaggaatggtgaagttgttggagtagaacctagacctggaggccaaaatgattcccagcaaggacagttggaagaaaacaataatagatttatttcggtagatgaggactcctcaggaaaccaagaagaacaagaggaagatgaagaacatgctggtgaacaagatgaggaggatgaggaggaggaggagatggaccaggagagtgacgattttgatcagtctgatgatagtagcagagaagatgaacatacacatactaacagtgtcacgaactccagtagtattgtggacctgcccgttcaccaactctcctccccattctatacaaaaacaacaaaaatgaaaagaaagttggaccatggttctgaggtccgctctttttctttgggaaagaaaccatgcaaagtctcagaatatacaagtaccactgggcttgtaccatgttcagcaacaccaacaacttttggggacctcagagcagccaatggccaagggcaacaacgacgccgaattacatctgtccagccacctacaggcctccaggaatggctaaaaatgtttcagagctggagtggaccagagaaattgcttgctttagatgaactcattgatagttgtgaaccaacacaagtaaaacatatgatgcaagtgatagaaccccagtttcaacgagacttcatttcattgctccctaaagagttggcactctatgtgctttcattcctggaacccaaagacctgctacaagcagctcagacatgtcgctactggagaattttggctgaagacaaccttctctggagagagaaatgcaaagaagaggggattgatgaaccattgcacatcaagagaagaaaagtaataaaaccaggtttcatacacagtccatggaaaagtgcatacatcagacagcacagaattgatactaactcgaggcgaggaggcagcggcagcggcagcggcagcggcagcgaagtgaaactggtggaaagcggcggcgatctggtgaaaccgggcggcagcctgaaactgagctgcgcggcgagcggctttacctttagccattatggcatgagctgggtgcgccagaccccggataaacgcctggaatgggtggcgaccattggcagccgcggcacctatacccattatccggatagcgtgaaaggccgctttaccattagccgcgataacgataaaaacgcgctgtatctgcagatgaacagcctgcgcaccgaagataccgcgatgtattattgcgcgcgcaaaagcgaattttattattatggcaacacctattattatagcgcgatggattattggggccagggcgcgagcgtgaccgtgagcagcggcggcggcggcagcggcggcggcgatagcggcggcggcggcagcgatattgtgctgacccagagcccggcgagcctggcggtgagcctgggccagcgcgcgaccattagctgccgcgcgagcgaaagcgtggataactatggctttagctttatgaactggtttcagcagaaaccgggccagccgccgaaactgctgatttatgcgaccagcaaccgcggcagcggcgtgccggcgcgctttagcggcagcggcagcggcaccgattttagcctgaacattcatccggtggaagaagatgatagcgcgatgtatttttgccagcagaccaaagaagtgccgtggacctttggcggcggcaccaaactggaaattaaacgctaa

SEQ ID NO: 1235 - DNA, 1932 bp, synthetic construct
  source 1..1932: mol_type = other DNA; note = HA-FBXW7a-(GS)6-3DX.1 nucleic acid
atgtacccatacgatgttccagattacgctaatcaggaactgctctctgtgggcagcaaaagacgacgaactggaggctctctgagaggtaacccttcctcaagccaggtagatgaagaacagatgaatcgtgtggtagaggaggaacagcaacagcaactcagacaacaagaggaggagcacactgcaaggaatggtgaagttgttggagtagaacctagacctggaggccaaaatgattcccagcaaggacagttggaagaaaacaataatagatttatttcggtagatgaggactcctcaggaaaccaagaagaacaagaggaagatgaagaacatgctggtgaacaagatgaggaggatgaggaggaggaggagatggaccaggagagtgacgattttgatcagtctgatgatagtagcagagaagatgaacatacacatactaacagtgtcacgaactccagtagtattgtggacctgcccgttcaccaactctcctccccattctatacaaaaacaacaaaaatgaaaagaaagttggaccatggttctgaggtccgctctttttctttgggaaagaaaccatgcaaagtctcagaatatacaagtaccactgggcttgtaccatgttcagcaacaccaacaacttttggggacctcagagcagccaatggccaagggcaacaacgacgccgaattacatctgtccagccacctacaggcctccaggaatggctaaaaatgtttcagagctggagtggaccagagaaattgcttgctttagatgaactcattgatagttgtgaaccaacacaagtaaaacatatgatgcaagtgatagaaccccagtttcaacgagacttcatttcattgctccctaaagagttggcactctatgtgctttcattcctggaacccaaagacctgctacaagcagctcagacatgtcgctactggagaattttggctgaagacaaccttctctggagagagaaatgcaaagaagaggggattgatgaaccattgcacatcaagagaagaaaagtaataaaaccaggtttcatacacagtccatggaaaagtgcatacatcagacagcacagaattgatactaactcgaggcgaggaggcagcggcagcggcagcggcagcggcagcggcagcgaagtgaaactggtggaaagcggcggcgatctggtgaaaccgggcggcagcctgaaactgagctgcgcggcgagcggctttacctttagccattatggcatgagctgggtgcgccagaccccggataaacgcctggaatgggtggcgaccattggcagccgcggcacctatacccattatccggatagcgtgaaaggccgctttaccattagccgcgataacgataaaaacgcgctgtatctgcagatgaacagcctgcgcaccgaagataccgcgatgtattattgcgcgcgcaaaagcgaattttattattatggcaacacctattattatagcgcgatggattattggggccagggcgcgagcgtgaccgtgagcagcggcggcggcggcagcggcggcggcgatagcggcggcggcggcagcgatattgtgctgacccagagcccggcgagcctggcggtgagcctgggccagcgcgcgaccattagctgccgcgcgagcgaaagcgtggataactatggctttagctttatgaactggtttcagcagaaaccgggccagccgccgaaactgctgatttatgcgaccagcaaccgcggcagcggcgtgccggcgcgctttagcggcagcggcagcggcaccgattttagcctgaacattcatccggtggaagaagatgatagcgcgatgtatttttgccagcagaccaaagaagtgccgtggacctttggcggcggcaccaaactggaaattaaacgctaa

SEQ ID NO: 1236 - DNA, 1779 bp, synthetic construct
  source 1..1779: mol_type = other DNA; note = NLS-Keap1-(GS)1-3DX.1 nucleic acid
ccggcggcgaaacgcgtgaaactggatggcagcggcagcggcagccagccagatcccaggcctagcggggctggggcctgctgccgattcctgcccctgcagtcacagtgccctgagggggcaggggacgcggtgatgtacgcctccactgagtgcaaggcggaggtgacgccctcccagcatggcaaccgcaccttcagctacaccctggaggatcataccaagcaggcctttggcatcatgaacgagctgcggctcagccagcagctgtgtgacgtcacactgcaggtcaagtaccaggatgcaccggccgcccagttcatggcccacaaggtggtgctggcctcatccagccctgtcttcaaggccatgttcaccaacgggctgcgggagcagggcatggaggtggtgtccattgagggtatccaccccaaggtcatggagcgcctcattgaattcgcctacacggcctccatctccatgggcgagaagtgtgtcctccacgtcatgaacggtgctgtcatgtaccagatcgacagcgttgtccgtgcctgcagtgacttcctggtgcagcagctggaccccagcaatgccatcggcatcgccaacttcgctgagcagattggctgtgtggagttgcaccagcgtgcccgggagtacatctacatgcattttggggaggtggccaagcaagaggagttcttcaacctgtcccactgccaactggtgaccctcatcagccgggacgacctgaacgtgcgctgcgagtccgaggtcttccacgcctgcatcaactgggtcaagtacgactgcgaacagcgacggttctacgtccaggcgctgctgcgggccgtgcgctgccactcgttgacgccgaacttcctgcagatgcagctgcagaagtgcgagatcctgcagtccgactcccgctgcaaggactacctggtcaagatcttcgaggagctcaccctgcacaagcccacgcaggtgatgccctgccgggcgcccggcagcgaagtgaaactggtggaaagcggcggcgatctggtgaaaccgggcggcagcctgaaactgagctgcgcggcgagcggctttacctttagccattatggcatgagctgggtgcgccagaccccggataaacgcctggaatgggtggcgaccattggcagccgcggcacctatacccattatccggatagcgtgaaaggccgctttaccattagccgcgataacgataaaaacgcgctgtatctgcagatgaacagcctgcgcaccgaagataccgcgatgtattattgcgcgcgcaaaagcgaattttattattatggcaacacctattattatagcgcgatggattattggggccagggcgcgagcgtgaccgtgagcagcggcggcggcggcagcggcggcggcgatagcggcggcggcggcagcgatattgtgctgacccagagcccggcgagcctggcggtgagcctgggccagcgcgcgaccattagctgccgcgcgagcgaaagcgtggataactatggctttagctttatgaactggtttcagcagaaaccgggccagccgccgaaactgctgatttatgcgaccagcaaccgcggcagcggcgtgccggcgcgctttagcggcagcggcagcggcaccgattttagcctgaacattcatccggtggaagaagatgatagcgcgatgtatttttgccagcagaccaaagaagtgccgtggacctttggcggcggcaccaaactggaaattaaacgctaa

SEQ ID NO: 1237 - DNA, 1785 bp, synthetic construct
  source 1..1785: mol_type = other DNA; note = NLS-Keap1-(GS)2-3DX.1 nucleic acid
ccggcggcgaaacgcgtgaaactggatggcagcggcagcggcagccagccagatcccaggcctagcggggctggggcctgctgccgattcctgcccctgcagtcacagtgccctgagggggcaggggacgcggtgatgtacgcctccactgagtgcaaggcggaggtgacgccctcccagcatggcaaccgcaccttcagctacaccctggaggatcataccaagcaggcctttggcatcatgaacgagctgcggctcagccagcagctgtgtgacgtcacactgcaggtcaagtaccaggatgcaccggccgcccagttcatggcccacaaggtggtgctggcctcatccagccctgtcttcaaggccatgttcaccaacgggctgcgggagcagggcatggaggtggtgtccattgagggtatccaccccaaggtcatggagcgcctcattgaattcgcctacacggcctccatctccatgggcgagaagtgtgtcctccacgtcatgaacggtgctgtcatgtaccagatcgacagcgttgtccgtgcctgcagtgacttcctggtgcagcagctggaccccagcaatgccatcggcatcgccaacttcgctgagcagattggctgtgtggagttgcaccagcgtgcccgggagtacatctacatgcattttggggaggtggccaagcaagaggagttcttcaacctgtcccactgccaactggtgaccctcatcagccgggacgacctgaacgtgcgctgcgagtccgaggtcttccacgcctgcatcaactgggtcaagtacgactgcgaacagcgacggttctacgtccaggcgctgctgcgggccgtgcgctgccactcgttgacgccgaacttcctgcagatgcagctgcagaagtgcgagatcctgcagtccgactcccgctgcaaggactacctggtcaagatcttcgaggagctcaccctgcacaagcccacgcaggtgatgccctgccgggcgcccggcagcggcagcgaagtgaaactggtggaaagcggcggcgatctggtgaaaccgggcggcagcctgaaactgagctgcgcggcgagcggctttacctttagccattatggcatgagctgggtgcgccagaccccggataaacgcctggaatgggtggcgaccattggcagccgcggcacctatacccattatccggatagcgtgaaaggccgctttaccattagccgcgataacgataaaaacgcgctgtatctgcagatgaacagcctgcgcaccgaagataccgcgatgtattattgcgcgcgcaaaagcgaattttattattatggcaacacctattattatagcgcgatggattattggggccagggcgcgagcgtgaccgtgagcagcggcggcggcggcagcggcggcggcgatagcggcggcggcggcagcgatattgtgctgacccagagcccggcgagcctggcggtgagcctgggccagcgcgcgaccattagctgccgcgcgagcgaaagcgtggataactatggctttagctttatgaactggtttcagcagaaaccgggccagccgccgaaactgctgatttatgcgaccagcaaccgcggcagcggcgtgccggcgcgctttagcggcagcggcagcggcaccgattttagcctgaacattcatccggtggaagaagatgatagcgcgatgtatttttgccagcagaccaaagaagtgccgtggacctttggcggcggcaccaaactggaaattaaacgctaa

SEQ ID NO: 1238 - DNA, 1791 bp, synthetic construct
  source 1..1791: mol_type = other DNA; note = NLS-Keap1-(GS)3-3DX.1 nucleic acid
ccggcggcgaaacgcgtgaaactggatggcagcggcagcggcagccagccagatcccaggcctagcggggctggggcctgctgccgattcctgcccctgcagtcacagtgccctgagggggcaggggacgcggtgatgtacgcctccactgagtgcaaggcggaggtgacgccctcccagcatggcaaccgcaccttcagctacaccctggaggatcataccaagcaggcctttggcatcatgaacgagctgcggctcagccagcagctgtgtgacgtcacactgcaggtcaagtaccaggatgcaccggccgcccagttcatggcccacaaggtggtgctggcctcatccagccctgtcttcaaggccatgttcaccaacgggctgcgggagcagggcatggaggtggtgtccattgagggtatccaccccaaggtcatggagcgcctcattgaattcgcctacacggcctccatctccatgggcgagaagtgtgtcctccacgtcatgaacggtgctgtcatgtaccagatcgacagcgttgtccgtgcctgcagtgacttcctggtgcagcagctggaccccagcaatgccatcggcatcgccaacttcgctgagcagattggctgtgtggagttgcaccagcgtgcccgggagtacatctacatgcattttggggaggtggccaagcaagaggagttcttcaacctgtcccactgccaactggtgaccctcatcagccgggacgacctgaacgtgcgctgcgagtccgaggtcttccacgcctgcatcaactgggtcaagtacgactgcgaacagcgacggttctacgtccaggcgctgctgcgggccgtgcgctgccactcgttgacgccgaacttcctgcagatgcagctgcagaagtgcgagatcctgcagtccgactcccgctgcaaggactacctggtcaagatcttcgaggagctcaccctgcacaagcccacgcaggtgatgccctgccgggcgcccggcagcggcagcggcagcgaagtgaaactggtggaaagcggcggcgatctggtgaaaccgggcggcagcctgaaactgagctgcgcggcgagcggctttacctttagccattatggcatgagctgggtgcgccagaccccggataaacgcctggaatgggtggcgaccattggcagccgcggcacctatacccattatccggatagcgtgaaaggccgctttaccattagccgcgataacgataaaaacgcgctgtatctgcagatgaacagcctgcgcaccgaagataccgcgatgtattattgcgcgcgcaaaagcgaattttattattatggcaacacctattattatagcgcgatggattattggggccagggcgcgagcgtgaccgtgagcagcggcggcggcggcagcggcggcggcgatagcggcggcggcggcagcgatattgtgctgacccagagcccggcgagcctggcggtgagcctgggccagcgcgcgaccattagctgccgcgcgagcgaaagcgtggataactatggctttagctttatgaactggtttcagcagaaaccgggccagccgccgaaactgctgatttatgcgaccagcaaccgcggcagcggcgtgccggcgcgctttagcggcagcggcagcggcaccgattttagcctgaacattcatccggtggaagaagatgatagcgcgatgtatttttgccagcagaccaaagaagtgccgtggacctttggcggcggcaccaaactggaaattaaacgctaa

SEQ ID NO: 1239 - DNA, 1797 bp, synthetic construct
  source 1..1797: mol_type = other DNA; note = NLS-Keap1-(GS)4-3DX.1 nucleic acid
ccggcggcgaaacgcgtgaaactggatggcagcggcagcggcagccagccagatcccaggcctagcggggctggggcctgctgccgattcctgcccctgcagtcacagtgccctgagggggcaggggacgcggtgatgtacgcctccactgagtgcaaggcggaggtgacgccctcccagcatggcaaccgcaccttcagctacaccctggaggatcataccaagcaggcctttggcatcatgaacgagctgcggctcagccagcagctgtgtgacgtcacactgcaggtcaagtaccaggatgcaccggccgcccagttcatggcccacaaggtggtgctggcctcatccagccctgtcttcaaggccatgttcaccaacgggctgcgggagcagggcatggaggtggtgtccattgagggtatccaccccaaggtcatggagcgcctcattgaattcgcctacacggcctccatctccatgggcgagaagtgtgtcctccacgtcatgaacggtgctgtcatgtaccagatcgacagcgttgtccgtgcctgcagtgacttcctggtgcagcagctggaccccagcaatgccatcggcatcgccaacttcgctgagcagattggctgtgtggagttgcaccagcgtgcccgggagtacatctacatgcattttggggaggtggccaagcaagaggagttcttcaacctgtcccactgccaactggtgaccctcatcagccgggacgacctgaacgtgcgctgcgagtccgaggtcttccacgcctgcatcaactgggtcaagtacgactgcgaacagcgacggttctacgtccaggcgctgctgcgggccgtgcgctgccactcgttgacgccgaacttcctgcagatgcagctgcagaagtgcgagatcctgcagtccgactcccgctgcaaggactacctggtcaagatcttcgaggagctcaccctgcacaagcccacgcaggtgatgccctgccgggcgcccggcagcggcagcggcagcggcagcgaagtgaaactggtggaaagcggcggcgatctggtgaaaccgggcggcagcctgaaactgagctgcgcggcgagcggctttacctttagccattatggcatgagctgggtgcgccagaccccggataaacgcctggaatgggtggcgaccattggcagccgcggcacctatacccattatccggatagcgtgaaaggccgctttaccattagccgcgataacgataaaaacgcgctgtatctgcagatgaacagcctgcgcaccgaagataccgcgatgtattattgcgcgcgcaaaagcgaattttattattatggcaacacctattattatagcgcgatggattattggggccagggcgcgagcgtgaccgtgagcagcggcggcggcggcagcggcggcggcgatagcggcggcggcggcagcgatattgtgctgacccagagcccggcgagcctggcggtgagcctgggccagcgcgcgaccattagctgccgcgcgagcgaaagcgtggataactatggctttagctttatgaactggtttcagcagaaaccgggccagccgccgaaactgctgatttatgcgaccagcaaccgcggcagcggcgtgccggcgcgctttagcggcagcggcagcggcaccgattttagcctgaacattcatccggtggaagaagatgatagcgcgatgtatttttgccagcagaccaaagaagtgccgtggacctttggcggcggcaccaaactggaaattaaacgctaa

SEQ ID NO: 1240 - DNA, 1803 bp, synthetic construct
  source 1..1803: mol_type = other DNA; note = NLS-Keap1-(GS)5-3DX.1 nucleic acid
ccggcggcgaaacgcgtgaaactggatggcagcggcagcggcagccagccagatcccaggcctagcggggctggggcctgctgccgattcctgcccctgcagtcacagtgccctgagggggcaggggacgcggtgatgtacgcctccactgagtgcaaggcggaggtgacgccctcccagcatggcaaccgcaccttcagctacaccctggaggatcataccaagcaggcctttggcatcatgaacgagctgcggctcagccagcagctgtgtgacgtcacactgcaggtcaagtaccaggatgcaccggccgcccagttcatggcccacaaggtggtgctggcctcatccagccctgtcttcaaggccatgttcaccaacgggctgcgggagcagggcatggaggtggtgtccattgagggtatccaccccaaggtcatggagcgcctcattgaattcgcctacacggcctccatctccatgggcgagaagtgtgtcctccacgtcatgaacggtgctgtcatgtaccagatcgacagcgttgtccgtgcctgcagtgacttcctggtgcagcagctggaccccagcaatgccatcggcatcgccaacttcgctgagcagattggctgtgtggagttgcaccagcgtgcccgggagtacatctacatgcattttggggaggtggccaagcaagaggagttcttcaacctgtcccactgccaactggtgaccctcatcagccgggacgacctgaacgtgcgctgcgagtccgaggtcttccacgcctgcatcaactgggtcaagtacgactgcgaacagcgacggttctacgtccaggcgctgctgcgggccgtgcgctgccactcgttgacgccgaacttcctgcagatgcagctgcagaagtgcgagatcctgcagtccgactcccgctgcaaggactacctggtcaagatcttcgaggagctcaccctgcacaagcccacgcaggtgatgccctgccgggcgcccggcagcggcagcggcagcggcagcggcagcgaagtgaaactggtggaaagcggcggcgatctggtgaaaccgggcggcagcctgaaactgagctgcgcggcgagcggctttacctttagccattatggcatgagctgggtgcgccagaccccggataaacgcctggaatgggtggcgaccattggcagccgcggcacctatacccattatccggatagcgtgaaaggccgctttaccattagccgcgataacgataaaaacgcgctgtatctgcagatgaacagcctgcgcaccgaagataccgcgatgtattattgcgcgcgcaaaagcgaattttattattatggcaacacctattattatagcgcgatggattattggggccagggcgcgagcgtgaccgtgagcagcggcggcggcggcagcggcggcggcgatagcggcggcggcggcagcgatattgtgctgacccagagcccggcgagcctggcggtgagcctgggccagcgcgcgaccattagctgccgcgcgagcgaaagcgtggataactatggctttagctttatgaactggtttcagcagaaaccgggccagccgccgaaactgctgatttatgcgaccagcaaccgcggcagcggcgtgccggcgcgctttagcggcagcggcagcggcaccgattttagcctgaacattcatccggtggaagaagatgatagcgcgatgtatttttgccagcagaccaaagaagtgccgtggacctttggcggcggcaccaaactggaaattaaacgctaa

SEQ ID NO: 1241 - DNA, 1809 bp, synthetic construct
  source 1..1809: mol_type = other DNA; note = NLS-Keap1-(GS)6-3DX.1 nucleic acid
ccggcggcgaaacgcgtgaaactggatggcagcggcagcggcagccagccagatcccaggcctagcggggctggggcctgctgccgattcctgcccctgcagtcacagtgccctgagggggcaggggacgcggtgatgtacgcctccactgagtgcaaggcggaggtgacgccctcccagcatggcaaccgcaccttcagctacaccctggaggatcataccaagcaggcctttggcatcatgaacgagctgcggctcagccagcagctgtgtgacgtcacactgcaggtcaagtaccaggatgcaccggccgcccagttcatggcccacaaggtggtgctggcctcatccagccctgtcttcaaggccatgttcaccaacgggctgcgggagcagggcatggaggtggtgtccattgagggtatccaccccaaggtcatggagcgcctcattgaattcgcctacacggcctccatctccatgggcgagaagtgtgtcctccacgtcatgaacggtgctgtcatgtaccagatcgacagcgttgtccgtgcctgcagtgacttcctggtgcagcagctggaccccagcaatgccatcggcatcgccaacttcgctgagcagattggctgtgtggagttgcaccagcgtgcccgggagtacatctacatgcattttggggaggtggccaagcaagaggagttcttcaacctgtcccactgccaactggtgaccctcatcagccgggacgacctgaacgtgcgctgcgagtccgaggtcttccacgcctgcatcaactgggtcaagtacgactgcgaacagcgacggttctacgtccaggcgctgctgcgggccgtgcgctgccactcgttgacgccgaacttcctgcagatgcagctgcagaagtgcgagatcctgcagtccgactcccgctgcaaggactacctggtcaagatcttcgaggagctcaccctgcacaagcccacgcaggtgatgccctgccgggcgcccggcagcggcagcggcagcggcagcggcagcggcagcgaagtgaaactggtggaaagcggcggcgatctggtgaaaccgggcggcagcctgaaactgagctgcgcggcgagcggctttacctttagccattatggcatgagctgggtgcgccagaccccggataaacgcctggaatgggtggcgaccattggcagccgcggcacctatacccattatccggatagcgtgaaaggccgctttaccattagccgcgataacgataaaaacgcgctgtatctgcagatgaacagcctgcgcaccgaagataccgcgatgtattattgcgcgcgcaaaagcgaattttattattatggcaacacctattattatagcgcgatggattattggggccagggcgcgagcgtgaccgtgagcagcggcggcggcggcagcggcggcggcgatagcggcggcggcggcagcgatattgtgctgacccagagcccggcgagcctggcggtgagcctgggccagcgcgcgaccattagctgccgcgcgagcgaaagcgtggataactatggctttagctttatgaactggtttcagcagaaaccgggccagccgccgaaactgctgatttatgcgaccagcaaccgcggcagcggcgtgccggcgcgctttagcggcagcggcagcggcaccgattttagcctgaacattcatccggtggaagaagatgatagcgcgatgtatttttgccagcagaccaaagaagtgccgtggacctttggcggcggcaccaaactggaaattaaacgctaa

SEQ ID NO: 1242 - DNA, 1809 bp, synthetic construct
  source 1..1809: mol_type = other DNA; note = HA-NLS-Keap1-(GS)1-3DX.1 nucleic acid
atgtacccatacgatgttccagattacgctccggcggcgaaacgcgtgaaactggatggcagcggcagcggcagccagccagatcccaggcctagcggggctggggcctgctgccgattcctgcccctgcagtcacagtgccctgagggggcaggggacgcggtgatgtacgcctccactgagtgcaaggcggaggtgacgccctcccagcatggcaaccgcaccttcagctacaccctggaggatcataccaagcaggcctttggcatcatgaacgagctgcggctcagccagcagctgtgtgacgtcacactgcaggtcaagtaccaggatgcaccggccgcccagttcatggcccacaaggtggtgctggcctcatccagccctgtcttcaaggccatgttcaccaacgggctgcgggagcagggcatggaggtggtgtccattgagggtatccaccccaaggtcatggagcgcctcattgaattcgcctacacggcctccatctccatgggcgagaagtgtgtcctccacgtcatgaacggtgctgtcatgtaccagatcgacagcgttgtccgtgcctgcagtgacttcctggtgcagcagctggaccccagcaatgccatcggcatcgccaacttcgctgagcagattggctgtgtggagttgcaccagcgtgcccgggagtacatctacatgcattttggggaggtggccaagcaagaggagttcttcaacctgtcccactgccaactggtgaccctcatcagccgggacgacctgaacgtgcgctgcgagtccgaggtcttccacgcctgcatcaactgggtcaagtacgactgcgaacagcgacggttctacgtccaggcgctgctgcgggccgtgcgctgccactcgttgacgccgaacttcctgcagatgcagctgcagaagtgcgagatcctgcagtccgactcccgctgcaaggactacctggtcaagatcttcgaggagctcaccctgcacaagcccacgcaggtgatgccctgccgggcgcccggcagcgaagtgaaactggtggaaagcggcggcgatctggtgaaaccgggcggcagcctgaaactgagctgcgcggcgagcggctttacctttagccattatggcatgagctgggtgcgccagaccccggataaacgcctggaatgggtggcgaccattggcagccgcggcacctatacccattatccggatagcgtgaaaggccgctttaccattagccgcgataacgataaaaacgcgctgtatctgcagatgaacagcctgcgcaccgaagataccgcgatgtattattgcgcgcgcaaaagcgaattttattattatggcaacacctattattatagcgcgatggattattggggccagggcgcgagcgtgaccgtgagcagcggcggcggcggcagcggcggcggcgatagcggcggcggcggcagcgatattgtgctgacccagagcccggcgagcctggcggtgagcctgggccagcgcgcgaccattagctgccgcgcgagcgaaagcgtggataactatggctttagctttatgaactggtttcagcagaaaccgggccagccgccgaaactgctgatttatgcgaccagcaaccgcggcagcggcgtgccggcgcgctttagcggcagcggcagcggcaccgattttagcctgaacattcatccggtggaagaagatgatagcgcgatgtatttttgccagcagaccaaagaagtgccgtggacctttggcggcggcaccaaactggaaattaaacgctaa

SEQ ID NO: 1243 - DNA, 1815 bp, synthetic construct
  source 1..1815: mol_type = other DNA; note = HA-NLS-Keap1-(GS)2-3DX.1 nucleic acid
atgtacccatacgatgttccagattacgctccggcggcgaaacgcgtgaaactggatggcagcggcagcggcagccagccagatcccaggcctagcggggctggggcctgctgccgattcctgcccctgcagtcacagtgccctgagggggcaggggacgcggtgatgtacgcctccactgagtgcaaggcggaggtgacgccctcccagcatggcaaccgcaccttcagctacaccctggaggatcataccaagcaggcctttggcatcatgaacgagctgcggctcagccagcagctgtgtgacgtcacactgcaggtcaagtaccaggatgcaccggccgcccagttcatggcccacaaggtggtgctggcctcatccagccctgtcttcaaggccatgttcaccaacgggctgcgggagcagggcatggaggtggtgtccattgagggtatccaccccaaggtcatggagcgcctcattgaattcgcctacacggcctccatctccatgggcgagaagtgtgtcctccacgtcatgaacggtgctgtcatgtaccagatcgacagcgttgtccgtgcctgcagtgacttcctggtgcagcagctggaccccagcaatgccatcggcatcgccaacttcgctgagcagattggctgtgtggagttgcaccagcgtgcccgggagtacatctacatgcattttggggaggtggccaagcaagaggagttcttcaacctgtcccactgccaactggtgaccctcatcagccgggacgacctgaacgtgcgctgcgagtccgaggtcttccacgcctgcatcaactgggtcaagtacgactgcgaacagcgacggttctacgtccaggcgctgctgcgggccgtgcgctgccactcgttgacgccgaacttcctgcagatgcagctgcagaagtgcgagatcctgcagtccgactcccgctgcaaggactacctggtcaagatcttcgaggagctcaccctgcacaagcccacgcaggtgatgccctgccgggcgcccggcagcggcagcgaagtgaaactggtggaaagcggcggcgatctggtgaaaccgggcggcagcctgaaactgagctgcgcggcgagcggctttacctttagccattatggcatgagctgggtgcgccagaccccggataaacgcctggaatgggtggcgaccattggcagccgcggcacctatacccattatccggatagcgtgaaaggccgctttaccattagccgcgataacgataaaaacgcgctgtatctgcagatgaacagcctgcgcaccgaagataccgcgatgtattattgcgcgcgcaaaagcgaattttattattatggcaacacctattattatagcgcgatggattattggggccagggcgcgagcgtgaccgtgagcagcggcggcggcggcagcggcggcggcgatagcggcggcggcggcagcgatattgtgctgacccagagcccggcgagcctggcggtgagcctgggccagcgcgcgaccattagctgccgcgcgagcgaaagcgtggataactatggctttagctttatgaactggtttcagcagaaaccgggccagccgccgaaactgctgatttatgcgaccagcaaccgcggcagcggcgtgccggcgcgctttagcggcagcggcagcggcaccgattttagcctgaacattcatccggtggaagaagatgatagcgcgatgtatttttgccagcagaccaaagaagtgccgtggacctttggcggcggcaccaaactggaaattaaacgctaa

SEQ ID NO: 1244 - DNA, 1821 bp, synthetic construct
  source 1..1821: mol_type = other DNA; note = HA-NLS-Keap1-(GS)3-3DX.1 nucleic acid
atgtacccatacgatgttccagattacgctccggcggcgaaacgcgtgaaactggatggcagcggcagcggcagccagccagatcccaggcctagcggggctggggcctgctgccgattcctgcccctgcagtcacagtgccctgagggggcaggggacgcggtgatgtacgcctccactgagtgcaaggcggaggtgacgccctcccagcatggcaaccgcaccttcagctacaccctggaggatcataccaagcaggcctttggcatcatgaacgagctgcggctcagccagcagctgtgtgacgtcacactgcaggtcaagtaccaggatgcaccggccgcccagttcatggcccacaaggtggtgctggcctcatccagccctgtcttcaaggccatgttcaccaacgggctgcgggagcagggcatggaggtggtgtccattgagggtatccaccccaaggtcatggagcgcctcattgaattcgcctacacggcctccatctccatgggcgagaagtgtgtcctccacgtcatgaacggtgctgtcatgtaccagatcgacagcgttgtccgtgcctgcagtgacttcctggtgcagcagctggaccccagcaatgccatcggcatcgccaacttcgctgagcagattggctgtgtggagttgcaccagcgtgcccgggagtacatctacatgcattttggggaggtggccaagcaagaggagttcttcaacctgtcccactgccaactggtgaccctcatcagccgggacgacctgaacgtgcgctgcgagtccgaggtcttccacgcctgcatcaactgggtcaagtacgactgcgaacagcgacggttctacgtccaggcgctgctgcgggccgtgcgctgccactcgttgacgccgaacttcctgcagatgcagctgcagaagtgcgagatcctgcagtccgactcccgctgcaaggactacctggtcaagatcttcgaggagctcaccctgcacaagcccacgcaggtgatgccctgccgggcgcccggcagcggcagcggcagcgaagtgaaactggtggaaagcggcggcgatctggtgaaaccgggcggcagcctgaaactgagctgcgcggcgagcggctttacctttagccattatggcatgagctgggtgcgccagaccccggataaacgcctggaatgggtggcgaccattggcagccgcggcacctatacccattatccggatagcgtgaaaggccgctttaccattagccgcgataacgataaaaacgcgctgtatctgcagatgaacagcctgcgcaccgaagataccgcgatgtattattgcgcgcgcaaaagcgaattttattattatggcaacacctattattatagcgcgatggattattggggccagggcgcgagcgtgaccgtgagcagcggcggcggcggcagcggcggcggcgatagcggcggcggcggcagcgatattgtgctgacccagagcccggcgagcctggcggtgagcctgggccagcgcgcgaccattagctgccgcgcgagcgaaagcgtggataactatggctttagctttatgaactggtttcagcagaaaccgggccagccgccgaaactgctgatttatgcgaccagcaaccgcggcagcggcgtgccggcgcgctttagcggcagcggcagcggcaccgattttagcctgaacattcatccggtggaagaagatgatagcgcgatgtatttttgccagcagaccaaagaagtgccgtggacctttggcggcggcaccaaactggaaattaaacgctaa

SEQ ID NO: 1245 - DNA, 1827 bp, synthetic construct
  source 1..1827: mol_type = other DNA; note = HA-NLS-Keap1-(GS)4-3DX.1 nucleic acid
atgtacccatacgatgttccagattacgctccggcggcgaaacgcgtgaaactggatggcagcggcagcggcagccagccagatcccaggcctagcggggctggggcctgctgccgattcctgcccctgcagtcacagtgccctgagggggcaggggacgcggtgatgtacgcctccactgagtgcaaggcggaggtgacgccctcccagcatggcaaccgcaccttcagctacaccctggaggatcataccaagcaggcctttggcatcatgaacgagctgcggctcagccagcagctgtgtgacgtcacactgcaggtcaagtaccaggatgcaccggccgcccagttcatggcccacaaggtggtgctggcctcatccagccctgtcttcaaggccatgttcaccaacgggctgcgggagcagggcatggaggtggtgtccattgagggtatccaccccaaggtcatggagcgcctcattgaattcgcctacacggcctccatctccatgggcgagaagtgtgtcctccacgtcatgaacggtgctgtcatgtaccagatcgacagcgttgtccgtgcctgcagtgacttcctggtgcagcagctggaccccagcaatgccatcggcatcgccaacttcgctgagcagattggctgtgtggagttgcaccagcgtgcccgggagtacatctacatgcattttggggaggtggccaagcaagaggagttcttcaacctgtcccactgccaactggtgaccctcatcagccgggacgacctgaacgtgcgctgcgagtccgaggtcttccacgcctgcatcaactgggtcaagtacgactgcgaacagcgacggttctacgtccaggcgctgctgcgggccgtgcgctgccactcgttgacgccgaacttcctgcagatgcagctgcagaagtgcgagatcctgcagtccgactcccgctgcaaggactacctggtcaagatcttcgaggagctcaccctgcacaagcccacgcaggtgatgccctgccgggcgcccggcagcggcagcggcagcggcagcgaagtgaaactggtggaaagcggcggcgatctggtgaaaccgggcggcagcctgaaactgagctgcgcggcgagcggctttacctttagccattatggcatgagctgggtgcgccagaccccggataaacgcctggaatgggtggcgaccattggcagccgcggcacctatacccattatccggatagcgtgaaaggccgctttaccattagccgcgataacgataaaaacgcgctgtatctgcagatgaacagcctgcgcaccgaagataccgcgatgtattattgcgcgcgcaaaagcgaattttattattatggcaacacctattattatagcgcgatggattattggggccagggcgcgagcgtgaccgtgagcagcggcggcggcggcagcggcggcggcgatagcggcggcggcggcagcgatattgtgctgacccagagcccggcgagcctggcggtgagcctgggccagcgcgcgaccattagctgccgcgcgagcgaaagcgtggataactatggctttagctttatgaactggtttcagcagaaaccgggccagccgccgaaactgctgatttatgcgaccagcaaccgcggcagcggcgtgccggcgcgctttagcggcagcggcagcggcaccgattttagcctgaacattcatccggtggaagaagatgatagcgcgatgtatttttgccagcagaccaaagaagtgccgtggacctttggcggcggcaccaaactggaaattaaacgctaa

SEQ ID NO: 1246 - DNA, 1833 bp, synthetic construct
  source 1..1833: mol_type = other DNA; note = HA-NLS-Keap1-(GS)5-3DX.1 nucleic acid
atgtacccatacgatgttccagattacgctccggcggcgaaacgcgtgaaactggatggcagcggcagcggcagccagccagatcccaggcctagcggggctggggcctgctgccgattcctgcccctgcagtcacagtgccctgagggggcaggggacgcggtgatgtacgcctccactgagtgcaaggcggaggtgacgccctcccagcatggcaaccgcaccttcagctacaccctggaggatcataccaagcaggcctttggcatcatgaacgagctgcggctcagccagcagctgtgtgacgtcacactgcaggtcaagtaccaggatgcaccggccgcccagttcatggcccacaaggtggtgctggcctcatccagccctgtcttcaaggccatgttcaccaacgggctgcgggagcagggcatggaggtggtgtccattgagggtatccaccccaaggtcatggagcgcctcattgaattcgcctacacggcctccatctccatgggcgagaagtgtgtcctccacgtcatgaacggtgctgtcatgtaccagatcgacagcgttgtccgtgcctgcagtgacttcctggtgcagcagctggaccccagcaatgccatcggcatcgccaacttcgctgagcagattggctgtgtggagttgcaccagcgtgcccgggagtacatctacatgcattttggggaggtggccaagcaagaggagttcttcaacctgtcccactgccaactggtgaccctcatcagccgggacgacctgaacgtgcgctgcgagtccgaggtcttccacgcctgcatcaactgggtcaagtacgactgcgaacagcgacggttctacgtccaggcgctgctgcgggccgtgcgctgccactcgttgacgccgaacttcctgcagatgcagctgcagaagtgcgagatcctgcagtccgactcccgctgcaaggactacctggtcaagatcttcgaggagctcaccctgcacaagcccacgcaggtgatgccctgccgggcgcccggcagcggcagcggcagcggcagcggcagcgaagtgaaactggtggaaagcggcggcgatctggtgaaaccgggcggcagcctgaaactgagctgcgcggcgagcggctttacctttagccattatggcatgagctgggtgcgccagaccccggataaacgcctggaatgggtggcgaccattggcagccgcggcacctatacccattatccggatagcgtgaaaggccgctttaccattagccgcgataacgataaaaacgcgctgtatctgcagatgaacagcctgcgcaccgaagataccgcgatgtattattgcgcgcgcaaaagcgaattttattattatggcaacacctattattatagcgcgatggattattggggccagggcgcgagcgtgaccgtgagcagcggcggcggcggcagcggcggcggcgatagcggcggcggcggcagcgatattgtgctgacccagagcccggcgagcctggcggtgagcctgggccagcgcgcgaccattagctgccgcgcgagcgaaagcgtggataactatggctttagctttatgaactggtttcagcagaaaccgggccagccgccgaaactgctgatttatgcgaccagcaaccgcggcagcggcgtgccggcgcgctttagcggcagcggcagcggcaccgattttagcctgaacattcatccggtggaagaagatgatagcgcgatgtatttttgccagcagaccaaagaagtgccgtggacctttggcggcggcaccaaactggaaattaaacgctaa

SEQ ID NO: 1247 - DNA, 1839 bp, synthetic construct
  source 1..1839: mol_type = other DNA; note = HA-NLS-Keap1-(GS)6-3DX.1 nucleic acid
atgtacccatacgatgttccagattacgctccggcggcgaaacgcgtgaaactggatggcagcggcagcggcagccagccagatcccaggcctagcggggctggggcctgctgccgattcctgcccctgcagtcacagtgccctgagggggcaggggacgcggtgatgtacgcctccactgagtgcaaggcggaggtgacgccctcccagcatggcaaccgcaccttcagctacaccctggaggatcataccaagcaggcctttggcatcatgaacgagctgcggctcagccagcagctgtgtgacgtcacactgcaggtcaagtaccaggatgcaccggccgcccagttcatggcccacaaggtggtgctggcctcatccagccctgtcttcaaggccatgttcaccaacgggctgcgggagcagggcatggaggtggtgtccattgagggtatccaccccaaggtcatggagcgcctcattgaattcgcctacacggcctccatctccatgggcgagaagtgtgtcctccacgtcatgaacggtgctgtcatgtaccagatcgacagcgttgtccgtgcctgcagtgacttcctggtgcagcagctggaccccagcaatgccatcggcatcgccaacttcgctgagcagattggctgtgtggagttgcaccagcgtgcccgggagtacatctacatgcattttggggaggtggccaagcaagaggagttcttcaacctgtcccactgccaactggtgaccctcatcagccgggacgacctgaacgtgcgctgcgagtccgaggtcttccacgcctgcatcaactgggtcaagtacgactgcgaacagcgacggttctacgtccaggcgctgctgcgggccgtgcgctgccactcgttgacgccgaacttcctgcagatgcagctgcagaagtgcgagatcctgcagtccgactcccgctgcaaggactacctggtcaagatcttcgaggagctcaccctgcacaagcccacgcaggtgatgccctgccgggcgcccggcagcggcagcggcagcggcagcggcagcggcagcgaagtgaaactggtggaaagcggcggcgatctggtgaaaccgggcggcagcctgaaactgagctgcgcggcgagcggctttacctttagccattatggcatgagctgggtgcgccagaccccggataaacgcctggaatgggtggcgaccattggcagccgcggcacctatacccattatccggatagcgtgaaaggccgctttaccattagccgcgataacgataaaaacgcgctgtatctgcagatgaacagcctgcgcaccgaagataccgcgatgtattattgcgcgcgcaaaagcgaattttattattatggcaacacctattattatagcgcgatggattattggggccagggcgcgagcgtgaccgtgagcagcggcggcggcggcagcggcggcggcgatagcggcggcggcggcagcgatattgtgctgacccagagcccggcgagcctggcggtgagcctgggccagcgcgcgaccattagctgccgcgcgagcgaaagcgtggataactatggctttagctttatgaactggtttcagcagaaaccgggccagccgccgaaactgctgatttatgcgaccagcaaccgcggcagcggcgtgccggcgcgctttagcggcagcggcagcggcaccgattttagcctgaacattcatccggtggaagaagatgatagcgcgatgtatttttgccagcagaccaaagaagtgccgtggacctttggcggcggcaccaaactggaaattaaacgctaa

SEQ ID NO: 1248 - DNA, 1197 bp, synthetic construct
  source 1..1197: mol_type = other DNA; note = NLS-RNF125-(GS)1-3DX.1 nucleic acid
ccggcggcgaaacgcgtgaaactggatggcagcggcagcggcagcggctccgtgctgagcaccgacagcggcaaatcggcgcccgcctctgccaccgcgcgggccctggagcgcaggagggacccggagttgcccgtcacgtccttcgactgcgccgtgtgccttgaggtgttacaccagcctgtccggacccgctgcggccacgtattctgccgttcctgtattgctaccagtctgaagaacaacaagtggacctgtccttattgccgggcatatcttccttcagaaggagttccagcaactgatgtagccaaaagaatgaaatcagagtataagaactgcgctgagtgtgacaccctggtttgcctcagtgaaatgagggcacatattcggacttgtcagaagtacatagataagtatggaccaggcagcgaagtgaaactggtggaaagcggcggcgatctggtgaaaccgggcggcagcctgaaactgagctgcgcggcgagcggctttacctttagccattatggcatgagctgggtgcgccagaccccggataaacgcctggaatgggtggcgaccattggcagccgcggcacctatacccattatccggatagcgtgaaaggccgctttaccattagccgcgataacgataaaaacgcgctgtatctgcagatgaacagcctgcgcaccgaagataccgcgatgtattattgcgcgcgcaaaagcgaattttattattatggcaacacctattattatagcgcgatggattattggggccagggcgcgagcgtgaccgtgagcagcggcggcggcggcagcggcggcggcgatagcggcggcggcggcagcgatattgtgctgacccagagcccggcgagcctggcggtgagcctgggccagcgcgcgaccattagctgccgcgcgagcgaaagcgtggataactatggctttagctttatgaactggtttcagcagaaaccgggccagccgccgaaactgctgatttatgcgaccagcaaccgcggcagcggcgtgccggcgcgctttagcggcagcggcagcggcaccgattttagcctgaacattcatccggtggaagaagatgatagcgcgatgtatttttgccagcagaccaaagaagtgccgtggacctttggcggcggcaccaaactggaaattaaacgctaa

SEQ ID NO: 1249 - DNA, 1203 bp, synthetic construct
  source 1..1203: mol_type = other DNA; note = NLS-RNF125-(GS)2-3DX.1 nucleic acid
ccggcggcgaaacgcgtgaaactggatggcagcggcagcggcagcggctccgtgctgagcaccgacagcggcaaatcggcgcccgcctctgccaccgcgcgggccctggagcgcaggagggacccggagttgcccgtcacgtccttcgactgcgccgtgtgccttgaggtgttacaccagcctgtccggacccgctgcggccacgtattctgccgttcctgtattgctaccagtctgaagaacaacaagtggacctgtccttattgccgggcatatcttccttcagaaggagttccagcaactgatgtagccaaaagaatgaaatcagagtataagaactgcgctgagtgtgacaccctggtttgcctcagtgaaatgagggcacatattcggacttgtcagaagtacatagataagtatggaccaggcagcggcagcgaagtgaaactggtggaaagcggcggcgatctggtgaaaccgggcggcagcctgaaactgagctgcgcggcgagcggctttacctttagccattatggcatgagctgggtgcgccagaccccggataaacgcctggaatgggtggcgaccattggcagccgcggcacctatacccattatccggatagcgtgaaaggccgctttaccattagccgcgataacgataaaaacgcgctgtatctgcagatgaacagcctgcgcaccgaagataccgcgatgtattattgcgcgcgcaaaagcgaattttattattatggcaacacctattattatagcgcgatggattattggggccagggcgcgagcgtgaccgtgagcagcggcggcggcggcagcggcggcggcgatagcggcggcggcggcagcgatattgtgctgacccagagcccggcgagcctggcggtgagcctgggccagcgcgcgaccattagctgccgcgcgagcgaaagcgtggataactatggctttagctttatgaactggtttcagcagaaaccgggccagccgccgaaactgctgatttatgcgaccagcaaccgcggcagcggcgtgccggcgcgctttagcggcagcggcagcggcaccgattttagcctgaacattcatccggtggaagaagatgatagcgcgatgtatttttgccagcagaccaaagaagtgccgtggacctttggcggcggcaccaaactggaaattaaacgctaa

SEQ ID NO: 1250 - DNA, 1209 bp, synthetic construct
  source 1..1209: mol_type = other DNA; note = NLS-RNF125-(GS)3-3DX.1 nucleic acid
ccggcggcgaaacgcgtgaaactggatggcagcggcagcggcagcggctccgtgctgagcaccgacagcggcaaatcggcgcccgcctctgccaccgcgcgggccctggagcgcaggagggacccggagttgcccgtcacgtccttcgactgcgccgtgtgccttgaggtgttacaccagcctgtccggacccgctgcggccacgtattctgccgttcctgtattgctaccagtctgaagaacaacaagtggacctgtccttattgccgggcatatcttccttcagaaggagttccagcaactgatgtagccaaaagaatgaaatcagagtataagaactgcgctgagtgtgacaccctggtttgcctcagtgaaatgagggcacatattcggacttgtcagaagtacatagataagtatggaccaggcagcggcagcggcagcgaagtgaaactggtggaaagcggcggcgatctggtgaaaccgggcggcagcctgaaactgagctgcgcggcgagcggctttacctttagccattatggcatgagctgggtgcgccagaccccggataaacgcctggaatgggtggcgaccattggcagccgcggcacctatacccattatccggatagcgtgaaaggccgctttaccattagccgcgataacgataaaaacgcgctgtatctgcagatgaacagcctgcgcaccgaagataccgcgatgtattattgcgcgcgcaaaagcgaattttattattatggcaacacctattattatagcgcgatggattattggggccagggcgcgagcgtgaccgtgagcagcggcggcggcggcagcggcggcggcgatagcggcggcggcggcagcgatattgtgctgacccagagcccggcgagcctggcggtgagcctgggccagcgcgcgaccattagctgccgcgcgagcgaaagcgtggataactatggctttagctttatgaactggtttcagcagaaaccgggccagccgccgaaactgctgatttatgcgaccagcaaccgcggcagcggcgtgccggcgcgctttagcggcagcggcagcggcaccgattttagcctgaacattcatccggtggaagaagatgatagcgcgatgtatttttgccagcagaccaaagaagtgccgtggacctttggcggcggcaccaaactggaaattaaacgctaa

SEQ ID NO: 1251 - DNA, 1215 bp, synthetic construct
  source 1..1215: mol_type = other DNA; note = NLS-RNF125-(GS)4-3DX.1 nucleic acid
ccggcggcgaaacgcgtgaaactggatggcagcggcagcggcagcggctccgtgctgagcaccgacagcggcaaatcggcgcccgcctctgccaccgcgcgggccctggagcgcaggagggacccggagttgcccgtcacgtccttcgactgcgccgtgtgccttgaggtgttacaccagcctgtccggacccgctgcggccacgtattctgccgttcctgtattgctaccagtctgaagaacaacaagtggacctgtccttattgccgggcatatcttccttcagaaggagttccagcaactgatgtagccaaaagaatgaaatcagagtataagaactgcgctgagtgtgacaccctggtttgcctcagtgaaatgagggcacatattcggacttgtcagaagtacatagataagtatggaccaggcagcggcagcggcagcggcagcgaagtgaaactggtggaaagcggcggcgatctggtgaaaccgggcggcagcctgaaactgagctgcgcggcgagcggctttacctttagccattatggcatgagctgggtgcgccagaccccggataaacgcctggaatgggtggcgaccattggcagccgcggcacctatacccattatccggatagcgtgaaaggccgctttaccattagccgcgataacgataaaaacgcgctgtatctgcagatgaacagcctgcgcaccgaagataccgcgatgtattattgcgcgcgcaaaagcgaattttattattatggcaacacctattattatagcgcgatggattattggggccagggcgcgagcgtgaccgtgagcagcggcggcggcggcagcggcggcggcgatagcggcggcggcggcagcgatattgtgctgacccagagcccggcgagcctggcggtgagcctgggccagcgcgcgaccattagctgccgcgcgagcgaaagcgtggataactatggctttagctttatgaactggtttcagcagaaaccgggccagccgccgaaactgctgatttatgcgaccagcaaccgcggcagcggcgtgccggcgcgctttagcggcagcggcagcggcaccgattttagcctgaacattcatccggtggaagaagatgatagcgcgatgtatttttgccagcagaccaaagaagtgccgtggacctttggcggcggcaccaaactggaaattaaacgctaa

SEQ ID NO: 1252 - DNA, 1221 bp, synthetic construct
  source 1..1221: mol_type = other DNA; note = NLS-RNF125-(GS)5-3DX.1 nucleic acid
ccggcggcgaaacgcgtgaaactggatggcagcggcagcggcagcggctccgtgctgagcaccgacagcggcaaatcggcgcccgcctctgccaccgcgcgggccctggagcgcaggagggacccggagttgcccgtcacgtccttcgactgcgccgtgtgccttgaggtgttacaccagcctgtccggacccgctgcggccacgtattctgccgttcctgtattgctaccagtctgaagaacaacaagtggacctgtccttattgccgggcatatcttccttcagaaggagttccagcaactgatgtagccaaaagaatgaaatcagagtataagaactgcgctgagtgtgacaccctggtttgcctcagtgaaatgagggcacatattcggacttgtcagaagtacatagataagtatggaccaggcagcggcagcggcagcggcagcggcagcgaagtgaaactggtggaaagcggcggcgatctggtgaaaccgggcggcagcctgaaactgagctgcgcggcgagcggctttacctttagccattatggcatgagctgggtgcgccagaccccggataaacgcctggaatgggtggcgaccattggcagccgcggcacctatacccattatccggatagcgtgaaaggccgctttaccattagccgcgataacgataaaaacgcgctgtatctgcagatgaacagcctgcgcaccgaagataccgcgatgtattattgcgcgcgcaaaagcgaattttattattatggcaacacctattattatagcgcgatggattattggggccagggcgcgagcgtgaccgtgagcagcggcggcggcggcagcggcggcggcgatagcggcggcggcggcagcgatattgtgctgacccagagcccggcgagcctggcggtgagcctgggccagcgcgcgaccattagctgccgcgcgagcgaaagcgtggataactatggctttagctttatgaactggtttcagcagaaaccgggccagccgccgaaactgctgatttatgcgaccagcaaccgcggcagcggcgtgccggcgcgctttagcggcagcggcagcggcaccgattttagcctgaacattcatccggtggaagaagatgatagcgcgatgtatttttgccagcagaccaaagaagtgccgtggacctttggcggcggcaccaaactggaaattaaacgctaa

SEQ ID NO: 1253 - DNA, 1227 bp, synthetic construct
  source 1..1227: mol_type = other DNA; note = NLS-RNF125-(GS)6-3DX.1 nucleic acid
ccggcggcgaaacgcgtgaaactggatggcagcggcagcggcagcggctccgtgctgagcaccgacagcggcaaatcggcgcccgcctctgccaccgcgcgggccctggagcgcaggagggacccggagttgcccgtcacgtccttcgactgcgccgtgtgccttgaggtgttacaccagcctgtccggacccgctgcggccacgtattctgccgttcctgtattgctaccagtctgaagaacaacaagtggacctgtccttattgccgggcatatcttccttcagaaggagttccagcaactgatgtagccaaaagaatgaaatcagagtataagaactgcgctgagtgtgacaccctggtttgcctcagtgaaatgagggcacatattcggacttgtcagaagtacatagataagtatggaccaggcagcggcagcggcagcggcagcggcagcggcagcgaagtgaaactggtggaaagcggcggcgatctggtgaaaccgggcggcagcctgaaactgagctgcgcggcgagcggctttacctttagccattatggcatgagctgggtgcgccagaccccggataaacgcctggaatgggtggcgaccattggcagccgcggcacctatacccattatccggatagcgtgaaaggccgctttaccattagccgcgataacgataaaaacgcgctgtatctgcagatgaacagcctgcgcaccgaagataccgcgatgtattattgcgcgcgcaaaagcgaattttattattatggcaacacctattattatagcgcgatggattattggggccagggcgcgagcgtgaccgtgagcagcggcggcggcggcagcggcggcggcgatagcggcggcggcggcagcgatattgtgctgacccagagcccggcgagcctggcggtgagcctgggccagcgcgcgaccattagctgccgcgcgagcgaaagcgtggataactatggctttagctttatgaactggtttcagcagaaaccgggccagccgccgaaactgctgatttatgcgaccagcaaccgcggcagcggcgtgccggcgcgctttagcggcagcggcagcggcaccgattttagcctgaacattcatccggtggaagaagatgatagcgcgatgtatttttgccagcagaccaaagaagtgccgtggacctttggcggcggcaccaaactggaaattaaacgctaa

SEQ ID NO: 1254 - DNA, 1227 bp, synthetic construct
  source 1..1227: mol_type = other DNA; note = HA-NLS-RNF125-(GS)1-3DX.1 nucleic acid
atgtacccatacgatgttccagattacgctccggcggcgaaacgcgtgaaactggatggcagcggcagcggcagcggctccgtgctgagcaccgacagcggcaaatcggcgcccgcctctgccaccgcgcgggccctggagcgcaggagggacccggagttgcccgtcacgtccttcgactgcgccgtgtgccttgaggtgttacaccagcctgtccggacccgctgcggccacgtattctgccgttcctgtattgctaccagtctgaagaacaacaagtggacctgtccttattgccgggcatatcttccttcagaaggagttccagcaactgatgtagccaaaagaatgaaatcagagtataagaactgcgctgagtgtgacaccctggtttgcctcagtgaaatgagggcacatattcggacttgtcagaagtacatagataagtatggaccaggcagcgaagtgaaactggtggaaagcggcggcgatctggtgaaaccgggcggcagcctgaaactgagctgcgcggcgagcggctttacctttagccattatggcatgagctgggtgcgccagaccccggataaacgcctggaatgggtggcgaccattggcagccgcggcacctatacccattatccggatagcgtgaaaggccgctttaccattagccgcgataacgataaaaacgcgctgtatctgcagatgaacagcctgcgcaccgaagataccgcgatgtattattgcgcgcgcaaaagcgaattttattattatggcaacacctattattatagcgcgatggattattggggccagggcgcgagcgtgaccgtgagcagcggcggcggcggcagcggcggcggcgatagcggcggcggcggcagcgatattgtgctgacccagagcccggcgagcctggcggtgagcctgggccagcgcgcgaccattagctgccgcgcgagcgaaagcgtggataactatggctttagctttatgaactggtttcagcagaaaccgggccagccgccgaaactgctgatttatgcgaccagcaaccgcggcagcggcgtgccggcgcgctttagcggcagcggcagcggcaccgattttagcctgaacattcatccggtggaagaagatgatagcgcgatgtatttttgccagcagaccaaagaagtgccgtggacctttggcggcggcaccaaactggaaattaaacgctaa

SEQ ID NO: 1255 - DNA, 1233 bp, synthetic construct
  source 1..1233: mol_type = other DNA; note = HA-NLS-RNF125-(GS)2-3DX.1 nucleic acid
atgtacccatacgatgttccagattacgctccggcggcgaaacgcgtgaaactggatggcagcggcagcggcagcggctccgtgctgagcaccgacagcggcaaatcggcgcccgcctctgccaccgcgcgggccctggagcgcaggagggacccggagttgcccgtcacgtccttcgactgcgccgtgtgccttgaggtgttacaccagcctgtccggacccgctgcggccacgtattctgccgttcctgtattgctaccagtctgaagaacaacaagtggacctgtccttattgccgggcatatcttccttcagaaggagttccagcaactgatgtagccaaaagaatgaaatcagagtataagaactgcgctgagtgtgacaccctggtttgcctcagtgaaatgagggcacatattcggacttgtcagaagtacatagataagtatggaccaggcagcggcagcgaagtgaaactggtggaaagcggcggcgatctggtgaaaccgggcggcagcctgaaactgagctgcgcggcgagcggctttacctttagccattatggcatgagctgggtgcgccagaccccggataaacgcctggaatgggtggcgaccattggcagccgcggcacctatacccattatccggatagcgtgaaaggccgctttaccattagccgcgataacgataaaaacgcgctgtatctgcagatgaacagcctgcgcaccgaagataccgcgatgtattattgcgcgcgcaaaagcgaattttattattatggcaacacctattattatagcgcgatggattattggggccagggcgcgagcgtgaccgtgagcagcggcggcggcggcagcggcggcggcgatagcggcggcggcggcagcgatattgtgctgacccagagcccggcgagcctggcggtgagcctgggccagcgcgcgaccattagctgccgcgcgagcgaaagcgtggataactatggctttagctttatgaactggtttcagcagaaaccgggccagccgccgaaactgctgatttatgcgaccagcaaccgcggcagcggcgtgccggcgcgctttagcggcagcggcagcggcaccgattttagcctgaacattcatccggtggaagaagatgatagcgcgatgtatttttgccagcagaccaaagaagtgccgtggacctttggcggcggcaccaaactggaaattaaacgctaa

SEQ ID NO: 1256 - DNA, 1239 bp, synthetic construct
  source 1..1239: mol_type = other DNA; note = HA-NLS-RNF125-(GS)3-3DX.1 nucleic acid
atgtacccatacgatgttccagattacgctccggcggcgaaacgcgtgaaactggatggcagcggcagcggcagcggctccgtgctgagcaccgacagcggcaaatcggcgcccgcctctgccaccgcgcgggccctggagcgcaggagggacccggagttgcccgtcacgtccttcgactgcgccgtgtgccttgaggtgttacaccagcctgtccggacccgctgcggccacgtattctgccgttcctgtattgctaccagtctgaagaacaacaagtggacctgtccttattgccgggcatatcttccttcagaaggagttccagcaactgatgtagccaaaagaatgaaatcagagtataagaactgcgctgagtgtgacaccctggtttgcctcagtgaaatgagggcacatattcggacttgtcagaagtacatagataagtatggaccaggcagcggcagcggcagcgaagtgaaactggtggaaagcggcggcgatctggtgaaaccgggcggcagcctgaaactgagctgcgcggcgagcggctttacctttagccattatggcatgagctgggtgcgccagaccccggataaacgcctggaatgggtggcgaccattggcagccgcggcacctatacccattatccggatagcgtgaaaggccgctttaccattagccgcgataacgataaaaacgcgctgtatctgcagatgaacagcctgcgcaccgaagataccgcgatgtattattgcgcgcgcaaaagcgaattttattattatggcaacacctattattatagcgcgatggattattggggccagggcgcgagcgtgaccgtgagcagcggcggcggcggcagcggcggcggcgatagcggcggcggcggcagcgatattgtgctgacccagagcccggcgagcctggcggtgagcctgggccagcgcgcgaccattagctgccgcgcgagcgaaagcgtggataactatggctttagctttatgaactggtttcagcagaaaccgggccagccgccgaaactgctgatttatgcgaccagcaaccgcggcagcggcgtgccggcgcgctttagcggcagcggcagcggcaccgattttagcctgaacattcatccggtggaagaagatgatagcgcgatgtatttttgccagcagaccaaagaagtgccgtggacctttggcggcggcaccaaactggaaattaaacgctaa

SEQ ID NO: 1257 - DNA, 1245 bp, synthetic construct
  source 1..1245: mol_type = other DNA; note = HA-NLS-RNF125-(GS)4-3DX.1 nucleic acid
atgtacccatacgatgttccagattacgctccggcggcgaaacgcgtgaaactggatggcagcggcagcggcagcggctccgtgctgagcaccgacagcggcaaatcggcgcccgcctctgccaccgcgcgggccctggagcgcaggagggacccggagttgcccgtcacgtccttcgactgcgccgtgtgccttgaggtgttacaccagcctgtccggacccgctgcggccacgtattctgccgttcctgtattgctaccagtctgaagaacaacaagtggacctgtccttattgccgggcatatcttccttcagaaggagttccagcaactgatgtagccaaaagaatgaaatcagagtataagaactgcgctgagtgtgacaccctggtttgcctcagtgaaatgagggcacatattcggacttgtcagaagtacatagataagtatggaccaggcagcggcagcggcagcggcagcgaagtgaaactggtggaaagcggcggcgatctggtgaaaccgggcggcagcctgaaactgagctgcgcggcgagcggctttacctttagccattatggcatgagctgggtgcgccagaccccggataaacgcctggaatgggtggcgaccattggcagccgcggcacctatacccattatccggatagcgtgaaaggccgctttaccattagccgcgataacgataaaaacgcgctgtatctgcagatgaacagcctgcgcaccgaagataccgcgatgtattattgcgcgcgcaaaagcgaattttattattatggcaacacctattattatagcgcgatggattattggggccagggcgcgagcgtgaccgtgagcagcggcggcggcggcagcggcggcggcgatagcggcggcggcggcagcgatattgtgctgacccagagcccggcgagcctggcggtgagcctgggccagcgcgcgaccattagctgccgcgcgagcgaaagcgtggataactatggctttagctttatgaactggtttcagcagaaaccgggccagccgccgaaactgctgatttatgcgaccagcaaccgcggcagcggcgtgccggcgcgctttagcggcagcggcagcggcaccgattttagcctgaacattcatccggtggaagaagatgatagcgcgatgtatttttgccagcagaccaaagaagtgccgtggacctttggcggcggcaccaaactggaaattaaacgctaa

SEQ ID NO: 1258 - DNA, 1251 bp, synthetic construct
  source 1..1251: mol_type = other DNA; note = HA-NLS-RNF125-(GS)5-3DX.1 nucleic acid
atgtacccatacgatgttccagattacgctccggcggcgaaacgcgtgaaactggatggcagcggcagcggcagcggctccgtgctgagcaccgacagcggcaaatcggcgcccgcctctgccaccgcgcgggccctggagcgcaggagggacccggagttgcccgtcacgtccttcgactgcgccgtgtgccttgaggtgttacaccagcctgtccggacccgctgcggccacgtattctgccgttcctgtattgctaccagtctgaagaacaacaagtggacctgtccttattgccgggcatatcttccttcagaaggagttccagcaactgatgtagccaaaagaatgaaatcagagtataagaactgcgctgagtgtgacaccctggtttgcctcagtgaaatgagggcacatattcggacttgtcagaagtacatagataagtatggaccaggcagcggcagcggcagcggcagcggcagcgaagtgaaactggtggaaagcggcggcgatctggtgaaaccgggcggcagcctgaaactgagctgcgcggcgagcggctttacctttagccattatggcatgagctgggtgcgccagaccccggataaacgcctggaatgggtggcgaccattggcagccgcggcacctatacccattatccggatagcgtgaaaggccgctttaccattagccgcgataacgataaaaacgcgctgtatctgcagatgaacagcctgcgcaccgaagataccgcgatgtattattgcgcgcgcaaaagcgaattttattattatggcaacacctattattatagcgcgatggattattggggccagggcgcgagcgtgaccgtgagcagcggcggcggcggcagcggcggcggcgatagcggcggcggcggcagcgatattgtgctgacccagagcccggcgagcctggcggtgagcctgggccagcgcgcgaccattagctgccgcgcgagcgaaagcgtggataactatggctttagctttatgaactggtttcagcagaaaccgggccagccgccgaaactgctgatttatgcgaccagcaaccgcggcagcggcgtgccggcgcgctttagcggcagcggcagcggcaccgattttagcctgaacattcatccggtggaagaagatgatagcgcgatgtatttttgccagcagaccaaagaagtgccgtggacctttggcggcggcaccaaactggaaattaaacgctaa

SEQ ID NO: 1259 - DNA, 1257 bp, synthetic construct
  source 1..1257: mol_type = other DNA; note = HA-NLS-RNF125-(GS)6-3DX.1 nucleic acid
atgtacccatacgatgttccagattacgctccggcggcgaaacgcgtgaaactggatggcagcggcagcggcagcggctccgtgctgagcaccgacagcggcaaatcggcgcccgcctctgccaccgcgcgggccctggagcgcaggagggacccggagttgcccgtcacgtccttcgactgcgccgtgtgccttgaggtgttacaccagcctgtccggacccgctgcggccacgtattctgccgttcctgtattgctaccagtctgaagaacaacaagtggacctgtccttattgccgggcatatcttccttcagaaggagttccagcaactgatgtagccaaaagaatgaaatcagagtataagaactgcgctgagtgtgacaccctggtttgcctcagtgaaatgagggcacatattcggacttgtcagaagtacatagataagtatggaccaggcagcggcagcggcagcggcagcggcagcggcagcgaagtgaaactggtggaaagcggcggcgatctggtgaaaccgggcggcagcctgaaactgagctgcgcggcgagcggctttacctttagccattatggcatgagctgggtgcgccagaccccggataaacgcctggaatgggtggcgaccattggcagccgcggcacctatacccattatccggatagcgtgaaaggccgctttaccattagccgcgataacgataaaaacgcgctgtatctgcagatgaacagcctgcgcaccgaagataccgcgatgtattattgcgcgcgcaaaagcgaattttattattatggcaacacctattattatagcgcgatggattattggggccagggcgcgagcgtgaccgtgagcagcggcggcggcggcagcggcggcggcgatagcggcggcggcggcagcgatattgtgctgacccagagcccggcgagcctggcggtgagcctgggccagcgcgcgaccattagctgccgcgcgagcgaaagcgtggataactatggctttagctttatgaactggtttcagcagaaaccgggccagccgccgaaactgctgatttatgcgaccagcaaccgcggcagcggcgtgccggcgcgctttagcggcagcggcagcggcaccgattttagcctgaacattcatccggtggaagaagatgatagcgcgatgtatttttgccagcagaccaaagaagtgccgtggacctttggcggcggcaccaaactggaaattaaacgctaa

SEQ ID NO: 1260 - DNA, 1494 bp, synthetic construct
  source 1..1494: mol_type = other DNA; note = 3DX.1-(GS)1-SPOP-NLS nucleic acid
atggaagtgaaactggtggaaagcggcggcgatctggtgaaaccgggcggcagcctgaaactgagctgcgcggcgagcggctttacctttagccattatggcatgagctgggtgcgccagaccccggataaacgcctggaatgggtggcgaccattggcagccgcggcacctatacccattatccggatagcgtgaaaggccgctttaccattagccgcgataacgataaaaacgcgctgtatctgcagatgaacagcctgcgcaccgaagataccgcgatgtattattgcgcgcgcaaaagcgaattttattattatggcaacacctattattatagcgcgatggattattggggccagggcgcgagcgtgaccgtgagcagcggcggcggcggcagcggcggcggcgatagcggcggcggcggcagcgatattgtgctgacccagagcccggcgagcctggcggtgagcctgggccagcgcgcgaccattagctgccgcgcgagcgaaagcgtggataactatggctttagctttatgaactggtttcagcagaaaccgggccagccgccgaaactgctgatttatgcgaccagcaaccgcggcagcggcgtgccggcgcgctttagcggcagcggcagcggcaccgattttagcctgaacattcatccggtggaagaagatgatagcgcgatgtatttttgccagcagaccaaagaagtgccgtggacctttggcggcggcaccaaactggaaattaaacgcggcagcaacgggcttctccctgatgacaagcttaccctcttctgcgaggtgagtgttgtgcaagattctgtcaacatttctggccagaataccatgaacatggtaaaggttcctgagtgccggctggcagatgagttaggaggactgtgggagaattcccggttcacagactgctgcttgtgtgttgccggccaggaattccaggctcacaaggctatcttagcagctcgttctccggtttttagtgccatgtttgaacatgaaatggaggagagcaaaaagaatcgagttgaaatcaatgatgtggagcctgaagtttttaaggaaatgatgtgcttcatttacacggggaaggctccaaacctcgacaaaatggctgatgatttgctggcagctgctgacaagtatgccctggagcgcttaaaggtcatgtgtgaggatgccctctgcagtaacctgtccgtggagaacgctgcagaaattctcatcctggccgacctccacagtgcagatcagttgaaaactcaggcagtggatttcatcaactatcatgcttcggatgtcttggagacctctgggtggaagtcaatggtggtgtcacatccccacttggtggctgaggcataccgctctctggcttcagcacagtgcccttttctgggacccccacgcaaacgcctgaagcaatccggcagcggcagcccggcggcgaaacgcgtgaaactggat

SEQ ID NO: 1261 - DNA, 1500 bp, synthetic construct
  source 1..1500: mol_type = other DNA; note = 3DX.1-(GS)2-SPOP-NLS nucleic acid
atggaagtgaaactggtggaaagcggcggcgatctggtgaaaccgggcggcagcctgaaactgagctgcgcggcgagcggctttacctttagccattatggcatgagctgggtgcgccagaccccggataaacgcctggaatgggtggcgaccattggcagccgcggcacctatacccattatccggatagcgtgaaaggccgctttaccattagccgcgataacgataaaaacgcgctgtatctgcagatgaacagcctgcgcaccgaagataccgcgatgtattattgcgcgcgcaaaagcgaattttattattatggcaacacctattattatagcgcgatggattattggggccagggcgcgagcgtgaccgtgagcagcggcggcggcggcagcggcggcggcgatagcggcggcggcggcagcgatattgtgctgacccagagcccggcgagcctggcggtgagcctgggccagcgcgcgaccattagctgccgcgcgagcgaaagcgtggataactatggctttagctttatgaactggtttcagcagaaaccgggccagccgccgaaactgctgatttatgcgaccagcaaccgcggcagcggcgtgccggcgcgctttagcggcagcggcagcggcaccgattttagcctgaacattcatccggtggaagaagatgatagcgcgatgtatttttgccagcagaccaaagaagtgccgtggacctttggcggcggcaccaaactggaaattaaacgcggcagcggcagcaacgggcttctccctgatgacaagcttaccctcttctgcgaggtgagtgttgtgcaagattctgtcaacatttctggccagaataccatgaacatggtaaaggttcctgagtgccggctggcagatgagttaggaggactgtgggagaattcccggttcacagactgctgcttgtgtgttgccggccaggaattccaggctcacaaggctatcttagcagctcgttctccggtttttagtgccatgtttgaacatgaaatggaggagagcaaaaagaatcgagttgaaatcaatgatgtggagcctgaagtttttaaggaaatgatgtgcttcatttacacggggaaggctccaaacctcgacaaaatggctgatgatttgctggcagctgctgacaagtatgccctggagcgcttaaaggtcatgtgtgaggatgccctctgcagtaacctgtccgtggagaacgctgcagaaattctcatcctggccgacctccacagtgcagatcagttgaaaactcaggcagtggatttcatcaactatcatgcttcggatgtcttggagacctctgggtggaagtcaatggtggtgtcacatccccacttggtggctgaggcataccgctctctggcttcagcacagtgcccttttctgggacccccacgcaaacgcctgaagcaatccggcagcggcagcccggcggcgaaacgcgtgaaactggat

SEQ ID NO: 1262 - DNA, 1506 bp, synthetic construct
  source 1..1506: mol_type = other DNA; note = 3DX.1-(GS)3-SPOP-NLS nucleic acid
atggaagtgaaactggtggaaagcggcggcgatctggtgaaaccgggcggcagcctgaaactgagctgcgcggcgagcggctttacctttagccattatggcatgagctgggtgcgccagaccccggataaacgcctggaatgggtggcgaccattggcagccgcggcacctatacccattatccggatagcgtgaaaggccgctttaccattagccgcgataacgataaaaacgcgctgtatctgcagatgaacagcctgcgcaccgaagataccgcgatgtattattgcgcgcgcaaaagcgaattttattattatggcaacacctattattatagcgcgatggattattggggccagggcgcgagcgtgaccgtgagcagcggcggcggcggcagcggcggcggcgatagcggcggcggcggcagcgatattgtgctgacccagagcccggcgagcctggcggtgagcctgggccagcgcgcgaccattagctgccgcgcgagcgaaagcgtggataactatggctttagctttatgaactggtttcagcagaaaccgggccagccgccgaaactgctgatttatgcgaccagcaaccgcggcagcggcgtgccggcgcgctttagcggcagcggcagcggcaccgattttagcctgaacattcatccggtggaagaagatgatagcgcgatgtatttttgccagcagaccaaagaagtgccgtggacctttggcggcggcaccaaactggaaattaaacgcggcagcggcagcggcagcaacgggcttctccctgatgacaagcttaccctcttctgcgaggtgagtgttgtgcaagattctgtcaacatttctggccagaataccatgaacatggtaaaggttcctgagtgccggctggcagatgagttaggaggactgtgggagaattcccggttcacagactgctgcttgtgtgttgccggccaggaattccaggctcacaaggctatcttagcagctcgttctccggtttttagtgccatgtttgaacatgaaatggaggagagcaaaaagaatcgagttgaaatcaatgatgtggagcctgaagtttttaaggaaatgatgtgcttcatttacacggggaaggctccaaacctcgacaaaatggctgatgatttgctggcagctgctgacaagtatgccctggagcgcttaaaggtcatgtgtgaggatgccctctgcagtaacctgtccgtggagaacgctgcagaaattctcatcctggccgacctccacagtgcagatcagttgaaaactcaggcagtggatttcatcaactatcatgcttcggatgtcttggagacctctgggtggaagtcaatggtggtgtcacatccccacttggtggctgaggcataccgctctctggcttcagcacagtgcccttttctgggacccccacgcaaacgcctgaagcaatccggcagcggcagcccggcggcgaaacgcgtgaaactggat

SEQ ID NO: 1263 - DNA, 1512 bp, synthetic construct
  source 1..1512: mol_type = other DNA; note = 3DX.1-(GS)4-SPOP-NLS nucleic acid
atggaagtgaaactggtggaaagcggcggcgatctggtgaaaccgggcggcagcctgaaactgagctgcgcggcgagcggctttacctttagccattatggcatgagctgggtgcgccagaccccggataaacgcctggaatgggtggcgaccattggcagccgcggcacctatacccattatccggatagcgtgaaaggccgctttaccattagccgcgataacgataaaaacgcgctgtatctgcagatgaacagcctgcgcaccgaagataccgcgatgtattattgcgcgcgcaaaagcgaattttattattatggcaacacctattattatagcgcgatggattattggggccagggcgcgagcgtgaccgtgagcagcggcggcggcggcagcggcggcggcgatagcggcggcggcggcagcgatattgtgctgacccagagcccggcgagcctggcggtgagcctgggccagcgcgcgaccattagctgccgcgcgagcgaaagcgtggataactatggctttagctttatgaactggtttcagcagaaaccgggccagccgccgaaactgctgatttatgcgaccagcaaccgcggcagcggcgtgccggcgcgctttagcggcagcggcagcggcaccgattttagcctgaacattcatccggtggaagaagatgatagcgcgatgtatttttgccagcagaccaaagaagtgccgtggacctttggcggcggcaccaaactggaaattaaacgcggcagcggcagcggcagcggcagcaacgggcttctccctgatgacaagcttaccctcttctgcgaggtgagtgttgtgcaagattctgtcaacatttctggccagaataccatgaacatggtaaaggttcctgagtgccggctggcagatgagttaggaggactgtgggagaattcccggttcacagactgctgcttgtgtgttgccggccaggaattccaggctcacaaggctatcttagcagctcgttctccggtttttagtgccatgtttgaacatgaaatggaggagagcaaaaagaatcgagttgaaatcaatgatgtggagcctgaagtttttaaggaaatgatgtgcttcatttacacggggaaggctccaaacctcgacaaaatggctgatgatttgctggcagctgctgacaagtatgccctggagcgcttaaaggtcatgtgtgaggatgccctctgcagtaacctgtccgtggagaacgctgcagaaattctcatcctggccgacctccacagtgcagatcagttgaaaactcaggcagtggatttcatcaactatcatgcttcggatgtcttggagacctctgggtggaagtcaatggtggtgtcacatccccacttggtggctgaggcataccgctctctggcttcagcacagtgcccttttctgggacccccacgcaaacgcctgaagcaatccggcagcggcagcccggcggcgaaacgcgtgaaactggat

SEQ ID NO: 1264 - DNA, 1518 bp, synthetic construct
  source 1..1518: mol_type = other DNA; note = 3DX.1-(GS)5-SPOP-NLS nucleic acid
atggaagtgaaactggtggaaagcggcggcgatctggtgaaaccgggcggcagcctgaaactgagctgcgcggcgagcggctttacctttagccattatggcatgagctgggtgcgccagaccccggataaacgcctggaatgggtggcgaccattggcagccgcggcacctatacccattatccggatagcgtgaaaggccgctttaccattagccgcgataacgataaaaacgcgctgtatctgcagatgaacagcctgcgcaccgaagataccgcgatgtattattgcgcgcgcaaaagcgaattttattattatggcaacacctattattatagcgcgatggattattggggccagggcgcgagcgtgaccgtgagcagcggcggcggcggcagcggcggcggcgatagcggcggcggcggcagcgatattgtgctgacccagagcccggcgagcctggcggtgagcctgggccagcgcgcgaccattagctgccgcgcgagcgaaagcgtggataactatggctttagctttatgaactggtttcagcagaaaccgggccagccgccgaaactgctgatttatgcgaccagcaaccgcggcagcggcgtgccggcgcgctttagcggcagcggcagcggcaccgattttagcctgaacattcatccggtggaagaagatgatagcgcgatgtatttttgccagcagaccaaagaagtgccgtggacctttggcggcggcaccaaactggaaattaaacgcggcagcggcagcggcagcggcagcggcagcaacgggcttctccctgatgacaagcttaccctcttctgcgaggtgagtgttgtgcaagattctgtcaacatttctggccagaataccatgaacatggtaaaggttcctgagtgccggctggcagatgagttaggaggactgtgggagaattcccggttcacagactgctgcttgtgtgttgccggccaggaattccaggctcacaaggctatcttagcagctcgttctccggtttttagtgccatgtttgaacatgaaatggaggagagcaaaaagaatcgagttgaaatcaatgatgtggagcctgaagtttttaaggaaatgatgtgcttcatttacacggggaaggctccaaacctcgacaaaatggctgatgatttgctggcagctgctgacaagtatgccctggagcgcttaaaggtcatgtgtgaggatgccctctgcagtaacctgtccgtggagaacgctgcagaaattctcatcctggccgacctccacagtgcagatcagttgaaaactcaggcagtggatttcatcaactatcatgcttcggatgtcttggagacctctgggtggaagtcaatggtggtgtcacatccccacttggtggctgaggcataccgctctctggcttcagcacagtgcccttttctgggacccccacgcaaacgcctgaagcaatccggcagcggcagcccggcggcgaaacgcgtgaaactggat

SEQ ID NO: 1265 - DNA, 1524 bp, synthetic construct
  source 1..1524: mol_type = other DNA; note = 3DX.1-(GS)6-SPOP-NLS nucleic acid
atggaagtgaaactggtggaaagcggcggcgatctggtgaaaccgggcggcagcctgaaactgagctgcgcggcgagcggctttacctttagccattatggcatgagctgggtgcgccagaccccggataaacgcctggaatgggtggcgaccattggcagccgcggcacctatacccattatccggatagcgtgaaaggccgctttaccattagccgcgataacgataaaaacgcgctgtatctgcagatgaacagcctgcgcaccgaagataccgcgatgtattattgcgcgcgcaaaagcgaattttattattatggcaacacctattattatagcgcgatggattattggggccagggcgcgagcgtgaccgtgagcagcggcggcggcggcagcggcggcggcgatagcggcggcggcggcagcgatattgtgctgacccagagcccggcgagcctggcggtgagcctgggccagcgcgcgaccattagctgccgcgcgagcgaaagcgtggataactatggctttagctttatgaactggtttcagcagaaaccgggccagccgccgaaactgctgatttatgcgaccagcaaccgcggcagcggcgtgccggcgcgctttagcggcagcggcagcggcaccgattttagcctgaacattcatccggtggaagaagatgatagcgcgatgtatttttgccagcagaccaaagaagtgccgtggacctttggcggcggcaccaaactggaaattaaacgcggcagcggcagcggcagcggcagcggcagcggcagcaacgggcttctccctgatgacaagcttaccctcttctgcgaggtgagtgttgtgcaagattctgtcaacatttctggccagaataccatgaacatggtaaaggttcctgagtgccggctggcagatgagttaggaggactgtgggagaattcccggttcacagactgctgcttgtgtgttgccggccaggaattccaggctcacaaggctatcttagcagctcgttctccggtttttagtgccatgtttgaacatgaaatggaggagagcaaaaagaatcgagttgaaatcaatgatgtggagcctgaagtttttaaggaaatgatgtgcttcatttacacggggaaggctccaaacctcgacaaaatggctgatgatttgctggcagctgctgacaagtatgccctggagcgcttaaaggtcatgtgtgaggatgccctctgcagtaacctgtccgtggagaacgctgcagaaattctcatcctggccgacctccacagtgcagatcagttgaaaactcaggcagtggatttcatcaactatcatgcttcggatgtcttggagacctctgggtggaagtcaatggtggtgtcacatccccacttggtggctgaggcataccgctctctggcttcagcacagtgcccttttctgggacccccacgcaaacgcctgaagcaatccggcagcggcagcccggcggcgaaacgcgtgaaactggat

SEQ ID NO: 1266 - DNA, 1524 bp, synthetic construct
  source 1..1524: mol_type = other DNA; note = 3DX.1-(GS)1-SPOP-NLS-HA nucleic acid
atggaagtgaaactggtggaaagcggcggcgatctggtgaaaccgggcggcagcctgaaactgagctgcgcggcgagcggctttacctttagccattatggcatgagctgggtgcgccagaccccggataaacgcctggaatgggtggcgaccattggcagccgcggcacctatacccattatccggatagcgtgaaaggccgctttaccattagccgcgataacgataaaaacgcgctgtatctgcagatgaacagcctgcgcaccgaagataccgcgatgtattattgcgcgcgcaaaagcgaattttattattatggcaacacctattattatagcgcgatggattattggggccagggcgcgagcgtgaccgtgagcagcggcggcggcggcagcggcggcggcgatagcggcggcggcggcagcgatattgtgctgacccagagcccggcgagcctggcggtgagcctgggccagcgcgcgaccattagctgccgcgcgagcgaaagcgtggataactatggctttagctttatgaactggtttcagcagaaaccgggccagccgccgaaactgctgatttatgcgaccagcaaccgcggcagcggcgtgccggcgcgctttagcggcagcggcagcggcaccgattttagcctgaacattcatccggtggaagaagatgatagcgcgatgtatttttgccagcagaccaaagaagtgccgtggacctttggcggcggcaccaaactggaaattaaacgcggcagcaacgggcttctccctgatgacaagcttaccctcttctgcgaggtgagtgttgtgcaagattctgtcaacatttctggccagaataccatgaacatggtaaaggttcctgagtgccggctggcagatgagttaggaggactgtgggagaattcccggttcacagactgctgcttgtgtgttgccggccaggaattccaggctcacaaggctatcttagcagctcgttctccggtttttagtgccatgtttgaacatgaaatggaggagagcaaaaagaatcgagttgaaatcaatgatgtggagcctgaagtttttaaggaaatgatgtgcttcatttacacggggaaggctccaaacctcgacaaaatggctgatgatttgctggcagctgctgacaagtatgccctggagcgcttaaaggtcatgtgtgaggatgccctctgcagtaacctgtccgtggagaacgctgcagaaattctcatcctggccgacctccacagtgcagatcagttgaaaactcaggcagtggatttcatcaactatcatgcttcggatgtcttggagacctctgggtggaagtcaatggtggtgtcacatccccacttggtggctgaggcataccgctctctggcttcagcacagtgcccttttctgggacccccacgcaaacgcctgaagcaatccggcagcggcagcccggcggcgaaacgcgtgaaactggattacccatacgatgttccagattacgcttaa

SEQ ID NO: 1267 - DNA, 1530 bp, synthetic construct
  source 1..1530: mol_type = other DNA; note = 3DX.1-(GS)2-SPOP-NLS-HA nucleic acid
atggaagtgaaactggtggaaagcggcggcgatctggtgaaaccgggcggcagcctgaaactgagctgcgcggcgagcggctttacctttagccattatggcatgagctgggtgcgccagaccccggataaacgcctggaatgggtggcgaccattggcagccgcggcacctatacccattatccggatagcgtgaaaggccgctttaccattagccgcgataacgataaaaacgcgctgtatctgcagatgaacagcctgcgcaccgaagataccgcgatgtattattgcgcgcgcaaaagcgaattttattattatggcaacacctattattatagcgcgatggattattggggccagggcgcgagcgtgaccgtgagcagcggcggcggcggcagcggcggcggcgatagcggcggcggcggcagcgatattgtgctgacccagagcccggcgagcctggcggtgagcctgggccagcgcgcgaccattagctgccgcgcgagcgaaagcgtggataactatggctttagctttatgaactggtttcagcagaaaccgggccagccgccgaaactgctgatttatgcgaccagcaaccgcggcagcggcgtgccggcgcgctttagcggcagcggcagcggcaccgattttagcctgaacattcatccggtggaagaagatgatagcgcgatgtatttttgccagcagaccaaagaagtgccgtggacctttggcggcggcaccaaactggaaattaaacgcggcagcggcagcaacgggcttctccctgatgacaagcttaccctcttctgcgaggtgagtgttgtgcaagattctgtcaacatttctggccagaataccatgaacatggtaaaggttcctgagtgccggctggcagatgagttaggaggactgtgggagaattcccggttcacagactgctgcttgtgtgttgccggccaggaattccaggctcacaaggctatcttagcagctcgttctccggtttttagtgccatgtttgaacatgaaatggaggagagcaaaaagaatcgagttgaaatcaatgatgtggagcctgaagtttttaaggaaatgatgtgcttcatttacacggggaaggctccaaacctcgacaaaatggctgatgatttgctggcagctgctgacaagtatgccctggagcgcttaaaggtcatgtgtgaggatgccctctgcagtaacctgtccgtggagaacgctgcagaaattctcatcctggccgacctccacagtgcagatcagttgaaaactcaggcagtggatttcatcaactatcatgcttcggatgtcttggagacctctgggtggaagtcaatggtggtgtcacatccccacttggtggctgaggcataccgctctctggcttcagcacagtgcccttttctgggacccccacgcaaacgcctgaagcaatccggcagcggcagcccggcggcgaaacgcgtgaaactggattacccatacgatgttccagattacgcttaa

SEQ ID NO: 1268 - DNA, 1536 bp, synthetic construct
  source 1..1536: mol_type = other DNA; note = 3DX.1-(GS)3-SPOP-NLS-HA nucleic acid
atggaagtgaaactggtggaaagcggcggcgatctggtgaaaccgggcggcagcctgaaactgagctgcgcggcgagcggctttacctttagccattatggcatgagctgggtgcgccagaccccggataaacgcctggaatgggtggcgaccattggcagccgcggcacctatacccattatccggatagcgtgaaaggccgctttaccattagccgcgataacgataaaaacgcgctgtatctgcagatgaacagcctgcgcaccgaagataccgcgatgtattattgcgcgcgcaaaagcgaattttattattatggcaacacctattattatagcgcgatggattattggggccagggcgcgagcgtgaccgtgagcagcggcggcggcggcagcggcggcggcgatagcggcggcggcggcagcgatattgtgctgacccagagcccggcgagcctggcggtgagcctgggccagcgcgcgaccattagctgccgcgcgagcgaaagcgtggataactatggctttagctttatgaactggtttcagcagaaaccgggccagccgccgaaactgctgatttatgcgaccagcaaccgcggcagcggcgtgccggcgcgctttagcggcagcggcagcggcaccgattttagcctgaacattcatccggtggaagaagatgatagcgcgatgtatttttgccagcagaccaaagaagtgccgtggacctttggcggcggcaccaaactggaaattaaacgcggcagcggcagcggcagcaacgggcttctccctgatgacaagcttaccctcttctgcgaggtgagtgttgtgcaagattctgtcaacatttctggccagaataccatgaacatggtaaaggttcctgagtgccggctggcagatgagttaggaggactgtgggagaattcccggttcacagactgctgcttgtgtgttgccggccaggaattccaggctcacaaggctatcttagcagctcgttctccggtttttagtgccatgtttgaacatgaaatggaggagagcaaaaagaatcgagttgaaatcaatgatgtggagcctgaagtttttaaggaaatgatgtgcttcatttacacggggaaggctccaaacctcgacaaaatggctgatgatttgctggcagctgctgacaagtatgccctggagcgcttaaaggtcatgtgtgaggatgccctctgcagtaacctgtccgtggagaacgctgcagaaattctcatcctggccgacctccacagtgcagatcagttgaaaactcaggcagtggatttcatcaactatcatgcttcggatgtcttggagacctctgggtggaagtcaatggtggtgtcacatccccacttggtggctgaggcataccgctctctggcttcagcacagtgcccttttctgggacccccacgcaaacgcctgaagcaatccggcagcggcagcccggcggcgaaacgcgtgaaactggattacccatacgatgttccagattacgcttaa

SEQ ID NO: 1269 - DNA, 1542 bp, synthetic construct
  source 1..1542: mol_type = other DNA; note = 3DX.1-(GS)4-SPOP-NLS-HA nucleic acid
atggaagtgaaactggtggaaagcggcggcgatctggtgaaaccgggcggcagcctgaaactgagctgcgcggcgagcggctttacctttagccattatggcatgagctgggtgcgccagaccccggataaacgcctggaatgggtggcgaccattggcagccgcggcacctatacccattatccggatagcgtgaaaggccgctttaccattagccgcgataacgataaaaacgcgctgtatctgcagatgaacagcctgcgcaccgaagataccgcgatgtattattgcgcgcgcaaaagcgaattttattattatggcaacacctattattatagcgcgatggattattggggccagggcgcgagcgtgaccgtgagcagcggcggcggcggcagcggcggcggcgatagcggcggcggcggcagcgatattgtgctgacccagagcccggcgagcctggcggtgagcctgggccagcgcgcgaccattagctgccgcgcgagcgaaagcgtggataactatggctttagctttatgaactggtttcagcagaaaccgggccagccgccgaaactgctgatttatgcgaccagcaaccgcggcagcggcgtgccggcgcgctttagcggcagcggcagcggcaccgattttagcctgaacattcatccggtggaagaagatgatagcgcgatgtatttttgccagcagaccaaagaagtgccgtggacctttggcggcggcaccaaactggaaattaaacgcggcagcggcagcggcagcggcagcaacgggcttctccctgatgacaagcttaccctcttctgcgaggtgagtgttgtgcaagattctgtcaacatttctggccagaataccatgaacatggtaaaggttcctgagtgccggctggcagatgagttaggaggactgtgggagaattcccggttcacagactgctgcttgtgtgttgccggccaggaattccaggctcacaaggctatcttagcagctcgttctccggtttttagtgccatgtttgaacatgaaatggaggagagcaaaaagaatcgagttgaaatcaatgatgtggagcctgaagtttttaaggaaatgatgtgcttcatttacacggggaaggctccaaacctcgacaaaatggctgatgatttgctggcagctgctgacaagtatgccctggagcgcttaaaggtcatgtgtgaggatgccctctgcagtaacctgtccgtggagaacgctgcagaaattctcatcctggccgacctccacagtgcagatcagttgaaaactcaggcagtggatttcatcaactatcatgcttcggatgtcttggagacctctgggtggaagtcaatggtggtgtcacatccccacttggtggctgaggcataccgctctctggcttcagcacagtgcccttttctgggacccccacgcaaacgcctgaagcaatccggcagcggcagcccggcggcgaaacgcgtgaaactggattacccatacgatgttccagattacgcttaa

SEQ ID NO: 1270 - DNA, 1548 bp, synthetic construct
  source 1..1548: mol_type = other DNA; note = 3DX.1-(GS)5-SPOP-NLS-HA nucleic acid
atggaagtgaaactggtggaaagcggcggcgatctggtgaaaccgggcggcagcctgaaactgagctgcgcggcgagcggctttacctttagccattatggcatgagctgggtgcgccagaccccggataaacgcctggaatgggtggcgaccattggcagccgcggcacctatacccattatccggatagcgtgaaaggccgctttaccattagccgcgataacgataaaaacgcgctgtatctgcagatgaacagcctgcgcaccgaagataccgcgatgtattattgcgcgcgcaaaagcgaattttattattatggcaacacctattattatagcgcgatggattattggggccagggcgcgagcgtgaccgtgagcagcggcggcggcggcagcggcggcggcgatagcggcggcggcggcagcgatattgtgctgacccagagcccggcgagcctggcggtgagcctgggccagcgcgcgaccattagctgccgcgcgagcgaaagcgtggataactatggctttagctttatgaactggtttcagcagaaaccgggccagccgccgaaactgctgatttatgcgaccagcaaccgcggcagcggcgtgccggcgcgctttagcggcagcggcagcggcaccgattttagcctgaacattcatccggtggaagaagatgatagcgcgatgtatttttgccagcagaccaaagaagtgccgtggacctttggcggcggcaccaaactggaaattaaacgcggcagcggcagcggcagcggcagcggcagcaacgggcttctccctgatgacaagcttaccctcttctgcgaggtgagtgttgtgcaagattctgtcaacatttctggccagaataccatgaacatggtaaaggttcctgagtgccggctggcagatgagttaggaggactgtgggagaattcccggttcacagactgctgcttgtgtgttgccggccaggaattccaggctcacaaggctatcttagcagctcgttctccggtttttagtgccatgtttgaacatgaaatggaggagagcaaaaagaatcgagttgaaatcaatgatgtggagcctgaagtttttaaggaaatgatgtgcttcatttacacggggaaggctccaaacctcgacaaaatggctgatgatttgctggcagctgctgacaagtatgccctggagcgcttaaaggtcatgtgtgaggatgccctctgcagtaacctgtccgtggagaacgctgcagaaattctcatcctggccgacctccacagtgcagatcagttgaaaactcaggcagtggatttcatcaactatcatgcttcggatgtcttggagacctctgggtggaagtcaatggtggtgtcacatccccacttggtggctgaggcataccgctctctggcttcagcacagtgcccttttctgggacccccacgcaaacgcctgaagcaatccggcagcggcagcccggcggcgaaacgcgtgaaactggattacccatacgatgttccagattacgcttaa

SEQ ID NO: 1271 - DNA, 1554 bp, synthetic construct
  source 1..1554: mol_type = other DNA; note = 3DX.1-(GS)6-SPOP-NLS-HA nucleic acid
atggaagtgaaactggtggaaagcggcggcgatctggtgaaaccgggcggcagcctgaaactgagctgcgcggcgagcggctttacctttagccattatggcatgagctgggtgcgccagaccccggataaacgcctggaatgggtggcgaccattggcagccgcggcacctatacccattatccggatagcgtgaaaggccgctttaccattagccgcgataacgataaaaacgcgctgtatctgcagatgaacagcctgcgcaccgaagataccgcgatgtattattgcgcgcgcaaaagcgaattttattattatggcaacacctattattatagcgcgatggattattggggccagggcgcgagcgtgaccgtgagcagcggcggcggcggcagcggcggcggcgatagcggcggcggcggcagcgatattgtgctgacccagagcccggcgagcctggcggtgagcctgggccagcgcgcgaccattagctgccgcgcgagcgaaagcgtggataactatggctttagctttatgaactggtttcagcagaaaccgggccagccgccgaaactgctgatttatgcgaccagcaaccgcggcagcggcgtgccggcgcgctttagcggcagcggcagcggcaccgattttagcctgaacattcatccggtggaagaagatgatagcgcgatgtatttttgccagcagaccaaagaagtgccgtggacctttggcggcggcaccaaactggaaattaaacgcggcagcggcagcggcagcggcagcggcagcggcagcaacgggcttctccctgatgacaagcttaccctcttctgcgaggtgagtgttgtgcaagattctgtcaacatttctggccagaataccatgaacatggtaaaggttcctgagtgccggctggcagatgagttaggaggactgtgggagaattcccggttcacagactgctgcttgtgtgttgccggccaggaattccaggctcacaaggctatcttagcagctcgttctccggtttttagtgccatgtttgaacatgaaatggaggagagcaaaaagaatcgagttgaaatcaatgatgtggagcctgaagtttttaaggaaatgatgtgcttcatttacacggggaaggctccaaacctcgacaaaatggctgatgatttgctggcagctgctgacaagtatgccctggagcgcttaaaggtcatgtgtgaggatgccctctgcagtaacctgtccgtggagaacgctgcagaaattctcatcctggccgacctccacagtgcagatcagttgaaaactcaggcagtggatttcatcaactatcatgcttcggatgtcttggagacctctgggtggaagtcaatggtggtgtcacatccccacttggtggctgaggcataccgctctctggcttcagcacagtgcccttttctgggacccccacgcaaacgcctgaagcaatccggcagcggcagcccggcggcgaaacgcgtgaaactggattacccatacgatgttccagattacgcttaa

SEQ ID NO: 1272 - DNA, 1338 bp, synthetic construct
  source 1..1338: mol_type = other DNA; note = 3DX.2-(GS)1-CHIP-NLS nucleic acid
atggatattgtgctgacccagagcccggcgagcctggcggtgagcctgggccagcgcgcgaccattagctgccgcgcgagcgaaagcgtggataactatggctttagctttatgaactggtttcagcagaaaccgggccagccgccgaaactgctgatttatgcgaccagcaaccgcggcagcggcgtgccggcgcgctttagcggcagcggcagcggcaccgattttagcctgaacattcatccggtggaagaagatgatagcgcgatgtatttttgccagcagaccaaagaagtgccgtggacctttggcggcggcaccaaactggaaattaaacgcggcggcggcggcagcggcggcggcgatagcggcggcggcggcagcgaagtgaaactggtggaaagcggcggcgatctggtgaaaccgggcggcagcctgaaactgagctgcgcggcgagcggctttacctttagccattatggcatgagctgggtgcgccagaccccggataaacgcctggaatgggtggcgaccattggcagccgcggcacctatacccattatccggatagcgtgaaaggccgctttaccattagccgcgataacgataaaaacgcgctgtatctgcagatgaacagcctgcgcaccgaagataccgcgatgtattattgcgcgcgcaaaagcgaattttattattatggcaacacctattattatagcgcgatggattattggggccagggcgcgagcgtgaccgtgagcagcggcagccggctgaacttcggggacgacatccccagcgctcttcgaatcgcgaagaagaagcgctggaacagcattgaggagcggcgcatccaccaggagagcgagctgcactcctacctctccaggctcattgccgcggagcgtgagagggagctggaagagtgccagcgaaaccacgagggtgatgaggacgacagccacgtccgggcccagcaggcctgcattgaggccaagcacgacaagtacatggcggacatggacgagcttttttctcaggtggatgagaagaggaagaagcgagacatccccgactacctgtgtggcaagatcagctttgagctgatgcgggagccgtgcatcacgcccagtggcatcacctacgaccgcaaggacatcgaggagcacctgcagcgtgtgggtcattttgacccggtgaccaggagccccctgacccaggaacagctcatccccaacttggctatgaaggaggttattgacgcattcatctctgagaatggctgggtggaggactacggcagcggcagcccggcggcgaaacgcgtgaaactggat

SEQ ID NO: 1273 - DNA, 1344 bp, synthetic construct
  source 1..1344: mol_type = other DNA; note = 3DX.2-(GS)2-CHIP-NLS nucleic acid
atggatattgtgctgacccagagcccggcgagcctggcggtgagcctgggccagcgcgcgaccattagctgccgcgcgagcgaaagcgtggataactatggctttagctttatgaactggtttcagcagaaaccgggccagccgccgaaactgctgatttatgcgaccagcaaccgcggcagcggcgtgccggcgcgctttagcggcagcggcagcggcaccgattttagcctgaacattcatccggtggaagaagatgatagcgcgatgtatttttgccagcagaccaaagaagtgccgtggacctttggcggcggcaccaaactggaaattaaacgcggcggcggcggcagcggcggcggcgatagcggcggcggcggcagcgaagtgaaactggtggaaagcggcggcgatctggtgaaaccgggcggcagcctgaaactgagctgcgcggcgagcggctttacctttagccattatggcatgagctgggtgcgccagaccccggataaacgcctggaatgggtggcgaccattggcagccgcggcacctatacccattatccggatagcgtgaaaggccgctttaccattagccgcgataacgataaaaacgcgctgtatctgcagatgaacagcctgcgcaccgaagataccgcgatgtattattgcgcgcgcaaaagcgaattttattattatggcaacacctattattatagcgcgatggattattggggccagggcgcgagcgtgaccgtgagcagcggcagcggcagccggctgaacttcggggacgacatccccagcgctcttcgaatcgcgaagaagaagcgctggaacagcattgaggagcggcgcatccaccaggagagcgagctgcactcctacctctccaggctcattgccgcggagcgtgagagggagctggaagagtgccagcgaaaccacgagggtgatgaggacgacagccacgtccgggcccagcaggcctgcattgaggccaagcacgacaagtacatggcggacatggacgagcttttttctcaggtggatgagaagaggaagaagcgagacatccccgactacctgtgtggcaagatcagctttgagctgatgcgggagccgtgcatcacgcccagtggcatcacctacgaccgcaaggacatcgaggagcacctgcagcgtgtgggtcattttgacccggtgaccaggagccccctgacccaggaacagctcatccccaacttggctatgaaggaggttattgacgcattcatctctgagaatggctgggtggaggactacggcagcggcagcccggcggcgaaacgcgtgaaactggat

SEQ ID NO: 1274 - DNA, 1350 bp, synthetic construct
  source 1..1350: mol_type = other DNA; note = 3DX.2-(GS)3-CHIP-NLS nucleic acid
atggatattgtgctgacccagagcccggcgagcctggcggtgagcctgggccagcgcgcgaccattagctgccgcgcgagcgaaagcgtggataactatggctttagctttatgaactggtttcagcagaaaccgggccagccgccgaaactgctgatttatgcgaccagcaaccgcggcagcggcgtgccggcgcgctttagcggcagcggcagcggcaccgattttagcctgaacattcatccggtggaagaagatgatagcgcgatgtatttttgccagcagaccaaagaagtgccgtggacctttggcggcggcaccaaactggaaattaaacgcggcggcggcggcagcggcggcggcgatagcggcggcggcggcagcgaagtgaaactggtggaaagcggcggcgatctggtgaaaccgggcggcagcctgaaactgagctgcgcggcgagcggctttacctttagccattatggcatgagctgggtgcgccagaccccggataaacgcctggaatgggtggcgaccattggcagccgcggcacctatacccattatccggatagcgtgaaaggccgctttaccattagccgcgataacgataaaaacgcgctgtatctgcagatgaacagcctgcgcaccgaagataccgcgatgtattattgcgcgcgcaaaagcgaattttattattatggcaacacctattattatagcgcgatggattattggggccagggcgcgagcgtgaccgtgagcagcggcagcggcagcggcagccggctgaacttcggggacgacatccccagcgctcttcgaatcgcgaagaagaagcgctggaacagcattgaggagcggcgcatccaccaggagagcgagctgcactcctacctctccaggctcattgccgcggagcgtgagagggagctggaagagtgccagcgaaaccacgagggtgatgaggacgacagccacgtccgggcccagcaggcctgcattgaggccaagcacgacaagtacatggcggacatggacgagcttttttctcaggtggatgagaagaggaagaagcgagacatccccgactacctgtgtggcaagatcagctttgagctgatgcgggagccgtgcatcacgcccagtggcatcacctacgaccgcaaggacatcgaggagcacctgcagcgtgtgggtcattttgacccggtgaccaggagccccctgacccaggaacagctcatccccaacttggctatgaaggaggttattgacgcattcatctctgagaatggctgggtggaggactacggcagcggcagcccggcggcgaaacgcgtgaaactggat

SEQ ID NO: 1275 - DNA, 1356 bp, synthetic construct
  source 1..1356: mol_type = other DNA; note = 3DX.2-(GS)4-CHIP-NLS nucleic acid
atggatattgtgctgacccagagcccggcgagcctggcggtgagcctgggccagcgcgcgaccattagctgccgcgcgagcgaaagcgtggataactatggctttagctttatgaactggtttcagcagaaaccgggccagccgccgaaactgctgatttatgcgaccagcaaccgcggcagcggcgtgccggcgcgctttagcggcagcggcagcggcaccgattttagcctgaacattcatccggtggaagaagatgatagcgcgatgtatttttgccagcagaccaaagaagtgccgtggacctttggcggcggcaccaaactggaaattaaacgcggcggcggcggcagcggcggcggcgatagcggcggcggcggcagcgaagtgaaactggtggaaagcggcggcgatctggtgaaaccgggcggcagcctgaaactgagctgcgcggcgagcggctttacctttagccattatggcatgagctgggtgcgccagaccccggataaacgcctggaatgggtggcgaccattggcagccgcggcacctatacccattatccggatagcgtgaaaggccgctttaccattagccgcgataacgataaaaacgcgctgtatctgcagatgaacagcctgcgcaccgaagataccgcgatgtattattgcgcgcgcaaaagcgaattttattattatggcaacacctattattatagcgcgatggattattggggccagggcgcgagcgtgaccgtgagcagcggcagcggcagcggcagcggcagccggctgaacttcggggacgacatccccagcgctcttcgaatcgcgaagaagaagcgctggaacagcattgaggagcggcgcatccaccaggagagcgagctgcactcctacctctccaggctcattgccgcggagcgtgagagggagctggaagagtgccagcgaaaccacgagggtgatgaggacgacagccacgtccgggcccagcaggcctgcattgaggccaagcacgacaagtacatggcggacatggacgagcttttttctcaggtggatgagaagaggaagaagcgagacatccccgactacctgtgtggcaagatcagctttgagctgatgcgggagccgtgcatcacgcccagtggcatcacctacgaccgcaaggacatcgaggagcacctgcagcgtgtgggtcattttgacccggtgaccaggagccccctgacccaggaacagctcatccccaacttggctatgaaggaggttattgacgcattcatctctgagaatggctgggtggaggactacggcagcggcagcccggcggcgaaacgcgtgaaactggat

SEQ ID NO: 1276 - DNA, 1362 bp, synthetic construct
  source 1..1362: mol_type = other DNA; note = 3DX.2-(GS)5-CHIP-NLS nucleic acid
atggatattgtgctgacccagagcccggcgagcctggcggtgagcctgggccagcgcgcgaccattagctgccgcgcgagcgaaagcgtggataactatggctttagctttatgaactggtttcagcagaaaccgggccagccgccgaaactgctgatttatgcgaccagcaaccgcggcagcggcgtgccggcgcgctttagcggcagcggcagcggcaccgattttagcctgaacattcatccggtggaagaagatgatagcgcgatgtatttttgccagcagaccaaagaagtgccgtggacctttggcggcggcaccaaactggaaattaaacgcggcggcggcggcagcggcggcggcgatagcggcggcggcggcagcgaagtgaaactggtggaaagcggcggcgatctggtgaaaccgggcggcagcctgaaactgagctgcgcggcgagcggctttacctttagccattatggcatgagctgggtgcgccagaccccggataaacgcctggaatgggtggcgaccattggcagccgcggcacctatacccattatccggatagcgtgaaaggccgctttaccattagccgcgataacgataaaaacgcgctgtatctgcagatgaacagcctgcgcaccgaagataccgcgatgtattattgcgcgcgcaaaagcgaattttattattatggcaacacctattattatagcgcgatggattattggggccagggcgcgagcgtgaccgtgagcagcggcagcggcagcggcagcggcagcggcagccggctgaacttcggggacgacatccccagcgctcttcgaatcgcgaagaagaagcgctggaacagcattgaggagcggcgcatccaccaggagagcgagctgcactcctacctctccaggctcattgccgcggagcgtgagagggagctggaagagtgccagcgaaaccacgagggtgatgaggacgacagccacgtccgggcccagcaggcctgcattgaggccaagcacgacaagtacatggcggacatggacgagcttttttctcaggtggatgagaagaggaagaagcgagacatccccgactacctgtgtggcaagatcagctttgagctgatgcgggagccgtgcatcacgcccagtggcatcacctacgaccgcaaggacatcgaggagcacctgcagcgtgtgggtcattttgacccggtgaccaggagccccctgacccaggaacagctcatccccaacttggctatgaaggaggttattgacgcattcatctctgagaatggctgggtggaggactacggcagcggcagcccggcggcgaaacgcgtgaaactggat

SEQ ID NO: 1277 - DNA, 1368 bp, synthetic construct
  source 1..1368: mol_type = other DNA; note = 3DX.2-(GS)6-CHIP-NLS nucleic acid
atggatattgtgctgacccagagcccggcgagcctggcggtgagcctgggccagcgcgcgaccattagctgccgcgcgagcgaaagcgtggataactatggctttagctttatgaactggtttcagcagaaaccgggccagccgccgaaactgctgatttatgcgaccagcaaccgcggcagcggcgtgccggcgcgctttagcggcagcggcagcggcaccgattttagcctgaacattcatccggtggaagaagatgatagcgcgatgtatttttgccagcagaccaaagaagtgccgtggacctttggcggcggcaccaaactggaaattaaacgcggcggcggcggcagcggcggcggcgatagcggcggcggcggcagcgaagtgaaactggtggaaagcggcggcgatctggtgaaaccgggcggcagcctgaaactgagctgcgcggcgagcggctttacctttagccattatggcatgagctgggtgcgccagaccccggataaacgcctggaatgggtggcgaccattggcagccgcggcacctatacccattatccggatagcgtgaaaggccgctttaccattagccgcgataacgataaaaacgcgctgtatctgcagatgaacagcctgcgcaccgaagataccgcgatgtattattgcgcgcgcaaaagcgaattttattattatggcaacacctattattatagcgcgatggattattggggccagggcgcgagcgtgaccgtgagcagcggcagcggcagcggcagcggcagcggcagcggcagccggctgaacttcggggacgacatccccagcgctcttcgaatcgcgaagaagaagcgctggaacagcattgaggagcggcgcatccaccaggagagcgagctgcactcctacctctccaggctcattgccgcggagcgtgagagggagctggaagagtgccagcgaaaccacgagggtgatgaggacgacagccacgtccgggcccagcaggcctgcattgaggccaagcacgacaagtacatggcggacatggacgagcttttttctcaggtggatgagaagaggaagaagcgagacatccccgactacctgtgtggcaagatcagctttgagctgatgcgggagccgtgcatcacgcccagtggcatcacctacgaccgcaaggacatcgaggagcacctgcagcgtgtgggtcattttgacccggtgaccaggagccccctgacccaggaacagctcatccccaacttggctatgaaggaggttattgacgcattcatctctgagaatggctgggtggaggactacggcagcggcagcccggcggcgaaacgcgtgaaactggat

SEQ ID NO: 1278 - DNA, 1368 bp, synthetic construct
  source 1..1368: mol_type = other DNA; note = 3DX.2-(GS)1-CHIP-NLS-HA nucleic acid
atggatattgtgctgacccagagcccggcgagcctggcggtgagcctgggccagcgcgcgaccattagctgccgcgcgagcgaaagcgtggataactatggctttagctttatgaactggtttcagcagaaaccgggccagccgccgaaactgctgatttatgcgaccagcaaccgcggcagcggcgtgccggcgcgctttagcggcagcggcagcggcaccgattttagcctgaacattcatccggtggaagaagatgatagcgcgatgtatttttgccagcagaccaaagaagtgccgtggacctttggcggcggcaccaaactggaaattaaacgcggcggcggcggcagcggcggcggcgatagcggcggcggcggcagcgaagtgaaactggtggaaagcggcggcgatctggtgaaaccgggcggcagcctgaaactgagctgcgcggcgagcggctttacctttagccattatggcatgagctgggtgcgccagaccccggataaacgcctggaatgggtggcgaccattggcagccgcggcacctatacccattatccggatagcgtgaaaggccgctttaccattagccgcgataacgataaaaacgcgctgtatctgcagatgaacagcctgcgcaccgaagataccgcgatgtattattgcgcgcgcaaaagcgaattttattattatggcaacacctattattatagcgcgatggattattggggccagggcgcgagcgtgaccgtgagcagcggcagccggctgaacttcggggacgacatccccagcgctcttcgaatcgcgaagaagaagcgctggaacagcattgaggagcggcgcatccaccaggagagcgagctgcactcctacctctccaggctcattgccgcggagcgtgagagggagctggaagagtgccagcgaaaccacgagggtgatgaggacgacagccacgtccgggcccagcaggcctgcattgaggccaagcacgacaagtacatggcggacatggacgagcttttttctcaggtggatgagaagaggaagaagcgagacatccccgactacctgtgtggcaagatcagctttgagctgatgcgggagccgtgcatcacgcccagtggcatcacctacgaccgcaaggacatcgaggagcacctgcagcgtgtgggtcattttgacccggtgaccaggagccccctgacccaggaacagctcatccccaacttggctatgaaggaggttattgacgcattcatctctgagaatggctgggtggaggactacggcagcggcagcccggcggcgaaacgcgtgaaactggattacccatacgatgttccagattacgcttaa

SEQ ID NO: 1279 - DNA, 1374 bp, synthetic construct
  source 1..1374: mol_type = other DNA; note = 3DX.2-(GS)2-CHIP-NLS-HA nucleic acid
atggatattgtgctgacccagagcccggcgagcctggcggtgagcctgggccagcgcgcgaccattagctgccgcgcgagcgaaagcgtggataactatggctttagctttatgaactggtttcagcagaaaccgggccagccgccgaaactgctgatttatgcgaccagcaaccgcggcagcggcgtgccggcgcgctttagcggcagcggcagcggcaccgattttagcctgaacattcatccggtggaagaagatgatagcgcgatgtatttttgccagcagaccaaagaagtgccgtggacctttggcggcggcaccaaactggaaattaaacgcggcggcggcggcagcggcggcggcgatagcggcggcggcggcagcgaagtgaaactggtggaaagcggcggcgatctggtgaaaccgggcggcagcctgaaactgagctgcgcggcgagcggctttacctttagccattatggcatgagctgggtgcgccagaccccggataaacgcctggaatgggtggcgaccattggcagccgcggcacctatacccattatccggatagcgtgaaaggccgctttaccattagccgcgataacgataaaaacgcgctgtatctgcagatgaacagcctgcgcaccgaagataccgcgatgtattattgcgcgcgcaaaagcgaattttattattatggcaacacctattattatagcgcgatggattattggggccagggcgcgagcgtgaccgtgagcagcggcagcggcagccggctgaacttcggggacgacatccccagcgctcttcgaatcgcgaagaagaagcgctggaacagcattgaggagcggcgcatccaccaggagagcgagctgcactcctacctctccaggctcattgccgcggagcgtgagagggagctggaagagtgccagcgaaaccacgagggtgatgaggacgacagccacgtccgggcccagcaggcctgcattgaggccaagcacgacaagtacatggcggacatggacgagcttttttctcaggtggatgagaagaggaagaagcgagacatccccgactacctgtgtggcaagatcagctttgagctgatgcgggagccgtgcatcacgcccagtggcatcacctacgaccgcaaggacatcgaggagcacctgcagcgtgtgggtcattttgacccggtgaccaggagccccctgacccaggaacagctcatccccaacttggctatgaaggaggttattgacgcattcatctctgagaatggctgggtggaggactacggcagcggcagcccggcggcgaaacgcgtgaaactggattacccatacgatgttccagattacgcttaa

SEQ ID NO: 1280 - DNA, 1380 bp, synthetic construct
  source 1..1380: mol_type = other DNA; note = 3DX.2-(GS)3-CHIP-NLS-HA nucleic acid
atggatattgtgctgacccagagcccggcgagcctggcggtgagcctgggccagcgcgcgaccattagctgccgcgcgagcgaaagcgtggataactatggctttagctttatgaactggtttcagcagaaaccgggccagccgccgaaactgctgatttatgcgaccagcaaccgcggcagcggcgtgccggcgcgctttagcggcagcggcagcggcaccgattttagcctgaacattcatccggtggaagaagatgatagcgcgatgtatttttgccagcagaccaaagaagtgccgtggacctttggcggcggcaccaaactggaaattaaacgcggcggcggcggcagcggcggcggcgatagcggcggcggcggcagcgaagtgaaactggtggaaagcggcggcgatctggtgaaaccgggcggcagcctgaaactgagctgcgcggcgagcggctttacctttagccattatggcatgagctgggtgcgccagaccccggataaacgcctggaatgggtggcgaccattggcagccgcggcacctatacccattatccggatagcgtgaaaggccgctttaccattagccgcgataacgataaaaacgcgctgtatctgcagatgaacagcctgcgcaccgaagataccgcgatgtattattgcgcgcgcaaaagcgaattttattattatggcaacacctattattatagcgcgatggattattggggccagggcgcgagcgtgaccgtgagcagcggcagcggcagcggcagccggctgaacttcggggacgacatccccagcgctcttcgaatcgcgaagaagaagcgctggaacagcattgaggagcggcgcatccaccaggagagcgagctgcactcctacctctccaggctcattgccgcggagcgtgagagggagctggaagagtgccagcgaaaccacgagggtgatgaggacgacagccacgtccgggcccagcaggcctgcattgaggccaagcacgacaagtacatggcggacatggacgagcttttttctcaggtggatgagaagaggaagaagcgagacatccccgactacctgtgtggcaagatcagctttgagctgatgcgggagccgtgcatcacgcccagtggcatcacctacgaccgcaaggacatcgaggagcacctgcagcgtgtgggtcattttgacccggtgaccaggagccccctgacccaggaacagctcatccccaacttggctatgaaggaggttattgacgcattcatctctgagaatggctgggtggaggactacggcagcggcagcccggcggcgaaacgcgtgaaactggattacccatacgatgttccagattacgcttaa

SEQ ID NO: 1281 - DNA, 1386 bp, synthetic construct
  source 1..1386: mol_type = other DNA; note = 3DX.2-(GS)4-CHIP-NLS-HA nucleic acid
atggatattgtgctgacccagagcccggcgagcctggcggtgagcctgggccagcgcgcgaccattagctgccgcgcgagcgaaagcgtggataactatggctttagctttatgaactggtttcagcagaaaccgggccagccgccgaaactgctgatttatgcgaccagcaaccgcggcagcggcgtgccggcgcgctttagcggcagcggcagcggcaccgattttagcctgaacattcatccggtggaagaagatgatagcgcgatgtatttttgccagcagaccaaagaagtgccgtggacctttggcggcggcaccaaactggaaattaaacgcggcggcggcggcagcggcggcggcgatagcggcggcggcggcagcgaagtgaaactggtggaaagcggcggcgatctggtgaaaccgggcggcagcctgaaactgagctgcgcggcgagcggctttacctttagccattatggcatgagctgggtgcgccagaccccggataaacgcctggaatgggtggcgaccattggcagccgcggcacctatacccattatccggatagcgtgaaaggccgctttaccattagccgcgataacgataaaaacgcgctgtatctgcagatgaacagcctgcgcaccgaagataccgcgatgtattattgcgcgcgcaaaagcgaattttattattatggcaacacctattattatagcgcgatggattattggggccagggcgcgagcgtgaccgtgagcagcggcagcggcagcggcagcggcagccggctgaacttcggggacgacatccccagcgctcttcgaatcgcgaagaagaagcgctggaacagcattgaggagcggcgcatccaccaggagagcgagctgcactcctacctctccaggctcattgccgcggagcgtgagagggagctggaagagtgccagcgaaaccacgagggtgatgaggacgacagccacgtccgggcccagcaggcctgcattgaggccaagcacgacaagtacatggcggacatggacgagcttttttctcaggtggatgagaagaggaagaagcgagacatccccgactacctgtgtggcaagatcagctttgagctgatgcgggagccgtgcatcacgcccagtggcatcacctacgaccgcaaggacatcgaggagcacctgcagcgtgtgggtcattttgacccggtgaccaggagccccctgacccaggaacagctcatccccaacttggctatgaaggaggttattgacgcattcatctctgagaatggctgggtggaggactacggcagcggcagcccggcggcgaaacgcgtgaaactggattacccatacgatgttccagattacgcttaa

SEQ ID NO: 1282 - DNA, 1392 bp, synthetic construct
  source 1..1392: mol_type = other DNA; note = 3DX.2-(GS)5-CHIP-NLS-HA nucleic acid
atggatattgtgctgacccagagcccggcgagcctggcggtgagcctgggccagcgcgcgaccattagctgccgcgcgagcgaaagcgtggataactatggctttagctttatgaactggtttcagcagaaaccgggccagccgccgaaactgctgatttatgcgaccagcaaccgcggcagcggcgtgccggcgcgctttagcggcagcggcagcggcaccgattttagcctgaacattcatccggtggaagaagatgatagcgcgatgtatttttgccagcagaccaaagaagtgccgtggacctttggcggcggcaccaaactggaaattaaacgcggcggcggcggcagcggcggcggcgatagcggcggcggcggcagcgaagtgaaactggtggaaagcggcggcgatctggtgaaaccgggcggcagcctgaaactgagctgcgcggcgagcggctttacctttagccattatggcatgagctgggtgcgccagaccccggataaacgcctggaatgggtggcgaccattggcagccgcggcacctatacccattatccggatagcgtgaaaggccgctttaccattagccgcgataacgataaaaacgcgctgtatctgcagatgaacagcctgcgcaccgaagataccgcgatgtattattgcgcgcgcaaaagcgaattttattattatggcaacacctattattatagcgcgatggattattggggccagggcgcgagcgtgaccgtgagcagcggcagcggcagcggcagcggcagcggcagccggctgaacttcggggacgacatccccagcgctcttcgaatcgcgaagaagaagcgctggaacagcattgaggagcggcgcatccaccaggagagcgagctgcactcctacctctccaggctcattgccgcggagcgtgagagggagctggaagagtgccagcgaaaccacgagggtgatgaggacgacagccacgtccgggcccagcaggcctgcattgaggccaagcacgacaagtacatggcggacatggacgagcttttttctcaggtggatgagaagaggaagaagcgagacatccccgactacctgtgtggcaagatcagctttgagctgatgcgggagccgtgcatcacgcccagtggcatcacctacgaccgcaaggacatcgaggagcacctgcagcgtgtgggtcattttgacccggtgaccaggagccccctgacccaggaacagctcatccccaacttggctatgaaggaggttattgacgcattcatctctgagaatggctgggtggaggactacggcagcggcagcccggcggcgaaacgcgtgaaactggattacccatacgatgttccagattacgcttaa

SEQ ID NO: 1283 - DNA, 1398 bp, synthetic construct
  source 1..1398: mol_type = other DNA; note = 3DX.2-(GS)6-CHIP-NLS-HA nucleic acid
atggatattgtgctgacccagagcccggcgagcctggcggtgagcctgggccagcgcgcgaccattagctgccgcgcgagcgaaagcgtggataactatggctttagctttatgaactggtttcagcagaaaccgggccagccgccgaaactgctgatttatgcgaccagcaaccgcggcagcggcgtgccggcgcgctttagcggcagcggcagcggcaccgattttagcctgaacattcatccggtggaagaagatgatagcgcgatgtatttttgccagcagaccaaagaagtgccgtggacctttggcggcggcaccaaactggaaattaaacgcggcggcggcggcagcggcggcggcgatagcggcggcggcggcagcgaagtgaaactggtggaaagcggcggcgatctggtgaaaccgggcggcagcctgaaactgagctgcgcggcgagcggctttacctttagccattatggcatgagctgggtgcgccagaccccggataaacgcctggaatgggtggcgaccattggcagccgcggcacctatacccattatccggatagcgtgaaaggccgctttaccattagccgcgataacgataaaaacgcgctgtatctgcagatgaacagcctgcgcaccgaagataccgcgatgtattattgcgcgcgcaaaagcgaattttattattatggcaacacctattattatagcgcgatggattattggggccagggcgcgagcgtgaccgtgagcagcggcagcggcagcggcagcggcagcggcagcggcagccggctgaacttcggggacgacatccccagcgctcttcgaatcgcgaagaagaagcgctggaacagcattgaggagcggcgcatccaccaggagagcgagctgcactcctacctctccaggctcattgccgcggagcgtgagagggagctggaagagtgccagcgaaaccacgagggtgatgaggacgacagccacgtccgggcccagcaggcctgcattgaggccaagcacgacaagtacatggcggacatggacgagcttttttctcaggtggatgagaagaggaagaagcgagacatccccgactacctgtgtggcaagatcagctttgagctgatgcgggagccgtgcatcacgcccagtggcatcacctacgaccgcaaggacatcgaggagcacctgcagcgtgtgggtcattttgacccggtgaccaggagccccctgacccaggaacagctcatccccaacttggctatgaaggaggttattgacgcattcatctctgagaatggctgggtggaggactacggcagcggcagcccggcggcgaaacgcgtgaaactggattacccatacgatgttccagattacgcttaa

SEQ ID NO: 1284 - DNA, 921 bp, synthetic construct
  source 1..921: mol_type = other DNA; note = NLS-DCAF1-(GS)1-3DX.2 nucleic acid
ccggcggcgaaacgcgtgaaactggatggcagcggcagcggcagccaggcgccgattaactttaccagccgcctgaaccgccgcgcgagctttccgaaatatggcggcgtggatggcggctgctttgatcgccatctgatttttagccgcggcagcgatattgtgctgacccagagcccggcgagcctggcggtgagcctgggccagcgcgcgaccattagctgccgcgcgagcgaaagcgtggataactatggctttagctttatgaactggtttcagcagaaaccgggccagccgccgaaactgctgatttatgcgaccagcaaccgcggcagcggcgtgccggcgcgctttagcggcagcggcagcggcaccgattttagcctgaacattcatccggtggaagaagatgatagcgcgatgtatttttgccagcagaccaaagaagtgccgtggacctttggcggcggcaccaaactggaaattaaacgcggcggcggcggcagcggcggcggcgatagcggcggcggcggcagcgaagtgaaactggtggaaagcggcggcgatctggtgaaaccgggcggcagcctgaaactgagctgcgcggcgagcggctttacctttagccattatggcatgagctgggtgcgccagaccccggataaacgcctggaatgggtggcgaccattggcagccgcggcacctatacccattatccggatagcgtgaaaggccgctttaccattagccgcgataacgataaaaacgcgctgtatctgcagatgaacagcctgcgcaccgaagataccgcgatgtattattgcgcgcgcaaaagcgaattttattattatggcaacacctattattatagcgcgatggattattggggccagggcgcgagcgtgaccgtgagcagctaa

SEQ ID NO: 1285 - DNA, 927 bp, synthetic construct
  source 1..927: mol_type = other DNA; note = NLS-DCAF1-(GS)2-3DX.2 nucleic acid
ccggcggcgaaacgcgtgaaactggatggcagcggcagcggcagccaggcgccgattaactttaccagccgcctgaaccgccgcgcgagctttccgaaatatggcggcgtggatggcggctgctttgatcgccatctgatttttagccgcggcagcggcagcgatattgtgctgacccagagcccggcgagcctggcggtgagcctgggccagcgcgcgaccattagctgccgcgcgagcgaaagcgtggataactatggctttagctttatgaactggtttcagcagaaaccgggccagccgccgaaactgctgatttatgcgaccagcaaccgcggcagcggcgtgccggcgcgctttagcggcagcggcagcggcaccgattttagcctgaacattcatccggtggaagaagatgatagcgcgatgtatttttgccagcagaccaaagaagtgccgtggacctttggcggcggcaccaaactggaaattaaacgcggcggcggcggcagcggcggcggcgatagcggcggcggcggcagcgaagtgaaactggtggaaagcggcggcgatctggtgaaaccgggcggcagcctgaaactgagctgcgcggcgagcggctttacctttagccattatggcatgagctgggtgcgccagaccccggataaacgcctggaatgggtggcgaccattggcagccgcggcacctatacccattatccggatagcgtgaaaggccgctttaccattagccgcgataacgataaaaacgcgctgtatctgcagatgaacagcctgcgcaccgaagataccgcgatgtattattgcgcgcgcaaaagcgaattttattattatggcaacacctattattatagcgcgatggattattggggccagggcgcgagcgtgaccgtgagcagctaa

SEQ ID NO: 1286 - DNA, 933 bp, synthetic construct
  source 1..933: mol_type = other DNA; note = NLS-DCAF1-(GS)3-3DX.2 nucleic acid
ccggcggcgaaacgcgtgaaactggatggcagcggcagcggcagccaggcgccgattaactttaccagccgcctgaaccgccgcgcgagctttccgaaatatggcggcgtggatggcggctgctttgatcgccatctgatttttagccgcggcagcggcagcggcagcgatattgtgctgacccagagcccggcgagcctggcggtgagcctgggccagcgcgcgaccattagctgccgcgcgagcgaaagcgtggataactatggctttagctttatgaactggtttcagcagaaaccgggccagccgccgaaactgctgatttatgcgaccagcaaccgcggcagcggcgtgccggcgcgctttagcggcagcggcagcggcaccgattttagcctgaacattcatccggtggaagaagatgatagcgcgatgtatttttgccagcagaccaaagaagtgccgtggacctttggcggcggcaccaaactggaaattaaacgcggcggcggcggcagcggcggcggcgatagcggcggcggcggcagcgaagtgaaactggtggaaagcggcggcgatctggtgaaaccgggcggcagcctgaaactgagctgcgcggcgagcggctttacctttagccattatggcatgagctgggtgcgccagaccccggataaacgcctggaatgggtggcgaccattggcagccgcggcacctatacccattatccggatagcgtgaaaggccgctttaccattagccgcgataacgataaaaacgcgctgtatctgcagatgaacagcctgcgcaccgaagataccgcgatgtattattgcgcgcgcaaaagcgaattttattattatggcaacacctattattatagcgcgatggattattggggccagggcgcgagcgtgaccgtgagcagctaa

SEQ ID NO: 1287 - DNA, 939 bp, synthetic construct
  source 1..939: mol_type = other DNA; note = NLS-DCAF1-(GS)4-3DX.2 nucleic acid
ccggcggcgaaacgcgtgaaactggatggcagcggcagcggcagccaggcgccgattaactttaccagccgcctgaaccgccgcgcgagctttccgaaatatggcggcgtggatggcggctgctttgatcgccatctgatttttagccgcggcagcggcagcggcagcggcagcgatattgtgctgacccagagcccggcgagcctggcggtgagcctgggccagcgcgcgaccattagctgccgcgcgagcgaaagcgtggataactatggctttagctttatgaactggtttcagcagaaaccgggccagccgccgaaactgctgatttatgcgaccagcaaccgcggcagcggcgtgccggcgcgctttagcggcagcggcagcggcaccgattttagcctgaacattcatccggtggaagaagatgatagcgcgatgtatttttgccagcagaccaaagaagtgccgtggacctttggcggcggcaccaaactggaaattaaacgcggcggcggcggcagcggcggcggcgatagcggcggcggcggcagcgaagtgaaactggtggaaagcggcggcgatctggtgaaaccgggcggcagcctgaaactgagctgcgcggcgagcggctttacctttagccattatggcatgagctgggtgcgccagaccccggataaacgcctggaatgggtggcgaccattggcagccgcggcacctatacccattatccggatagcgtgaaaggccgctttaccattagccgcgataacgataaaaacgcgctgtatctgcagatgaacagcctgcgcaccgaagataccgcgatgtattattgcgcgcgcaaaagcgaattttattattatggcaacacctattattatagcgcgatggattattggggccagggcgcgagcgtgaccgtgagcagctaa

SEQ ID NO: 1288 - DNA, 945 bp, synthetic construct
  source 1..945: mol_type = other DNA; note = NLS-DCAF1-(GS)5-3DX.2 nucleic acid
ccggcggcgaaacgcgtgaaactggatggcagcggcagcggcagccaggcgccgattaactttaccagccgcctgaaccgccgcgcgagctttccgaaatatggcggcgtggatggcggctgctttgatcgccatctgatttttagccgcggcagcggcagcggcagcggcagcggcagcgatattgtgctgacccagagcccggcgagcctggcggtgagcctgggccagcgcgcgaccattagctgccgcgcgagcgaaagcgtggataactatggctttagctttatgaactggtttcagcagaaaccgggccagccgccgaaactgctgatttatgcgaccagcaaccgcggcagcggcgtgccggcgcgctttagcggcagcggcagcggcaccgattttagcctgaacattcatccggtggaagaagatgatagcgcgatgtatttttgccagcagaccaaagaagtgccgtggacctttggcggcggcaccaaactggaaattaaacgcggcggcggcggcagcggcggcggcgatagcggcggcggcggcagcgaagtgaaactggtggaaagcggcggcgatctggtgaaaccgggcggcagcctgaaactgagctgcgcggcgagcggctttacctttagccattatggcatgagctgggtgcgccagaccccggataaacgcctggaatgggtggcgaccattggcagccgcggcacctatacccattatccggatagcgtgaaaggccgctttaccattagccgcgataacgataaaaacgcgctgtatctgcagatgaacagcctgcgcaccgaagataccgcgatgtattattgcgcgcgcaaaagcgaattttattattatggcaacacctattattatagcgcgatggattattggggccagggcgcgagcgtgaccgtgagcagctaa

SEQ ID NO: 1289 - DNA, 951 bp, synthetic construct
  source 1..951: mol_type = other DNA; note = NLS-DCAF1-(GS)6-3DX.2 nucleic acid
ccggcggcgaaacgcgtgaaactggatggcagcggcagcggcagccaggcgccgattaactttaccagccgcctgaaccgccgcgcgagctttccgaaatatggcggcgtggatggcggctgctttgatcgccatctgatttttagccgcggcagcggcagcggcagcggcagcggcagcggcagcgatattgtgctgacccagagcccggcgagcctggcggtgagcctgggccagcgcgcgaccattagctgccgcgcgagcgaaagcgtggataactatggctttagctttatgaactggtttcagcagaaaccgggccagccgccgaaactgctgatttatgcgaccagcaaccgcggcagcggcgtgccggcgcgctttagcggcagcggcagcggcaccgattttagcctgaacattcatccggtggaagaagatgatagcgcgatgtatttttgccagcagaccaaagaagtgccgtggacctttggcggcggcaccaaactggaaattaaacgcggcggcggcggcagcggcggcggcgatagcggcggcggcggcagcgaagtgaaactggtggaaagcggcggcgatctggtgaaaccgggcggcagcctgaaactgagctgcgcggcgagcggctttacctttagccattatggcatgagctgggtgcgccagaccccggataaacgcctggaatgggtggcgaccattggcagccgcggcacctatacccattatccggatagcgtgaaaggccgctttaccattagccgcgataacgataaaaacgcgctgtatctgcagatgaacagcctgcgcaccgaagataccgcgatgtattattgcgcgcgcaaaagcgaattttattattatggcaacacctattattatagcgcgatggattattggggccagggcgcgagcgtgaccgtgagcagctaa

SEQ ID NO: 1290 - DNA, 951 bp, synthetic construct
  source 1..951: mol_type = other DNA; note = HA-NLS-DCAF1-(GS)1-3DX.2 nucleic acid
atgtacccatacgatgttccagattacgctccggcggcgaaacgcgtgaaactggatggcagcggcagcggcagccaggcgccgattaactttaccagccgcctgaaccgccgcgcgagctttccgaaatatggcggcgtggatggcggctgctttgatcgccatctgatttttagccgcggcagcgatattgtgctgacccagagcccggcgagcctggcggtgagcctgggccagcgcgcgaccattagctgccgcgcgagcgaaagcgtggataactatggctttagctttatgaactggtttcagcagaaaccgggccagccgccgaaactgctgatttatgcgaccagcaaccgcggcagcggcgtgccggcgcgctttagcggcagcggcagcggcaccgattttagcctgaacattcatccggtggaagaagatgatagcgcgatgtatttttgccagcagaccaaagaagtgccgtggacctttggcggcggcaccaaactggaaattaaacgcggcggcggcggcagcggcggcggcgatagcggcggcggcggcagcgaagtgaaactggtggaaagcggcggcgatctggtgaaaccgggcggcagcctgaaactgagctgcgcggcgagcggctttacctttagccattatggcatgagctgggtgcgccagaccccggataaacgcctggaatgggtggcgaccattggcagccgcggcacctatacccattatccggatagcgtgaaaggccgctttaccattagccgcgataacgataaaaacgcgctgtatctgcagatgaacagcctgcgcaccgaagataccgcgatgtattattgcgcgcgcaaaagcgaattttattattatggcaacacctattattatagcgcgatggattattggggccagggcgcgagcgtgaccgtgagcagctaa

SEQ ID NO: 1291 - DNA, 957 bp, synthetic construct
  source 1..957: mol_type = other DNA; note = HA-NLS-DCAF1-(GS)2-3DX.2 nucleic acid
atgtacccatacgatgttccagattacgctccggcggcgaaacgcgtgaaactggatggcagcggcagcggcagccaggcgccgattaactttaccagccgcctgaaccgccgcgcgagctttccgaaatatggcggcgtggatggcggctgctttgatcgccatctgatttttagccgcggcagcggcagcgatattgtgctgacccagagcccggcgagcctggcggtgagcctgggccagcgcgcgaccattagctgccgcgcgagcgaaagcgtggataactatggctttagctttatgaactggtttcagcagaaaccgggccagccgccgaaactgctgatttatgcgaccagcaaccgcggcagcggcgtgccggcgcgctttagcggcagcggcagcggcaccgattttagcctgaacattcatccggtggaagaagatgatagcgcgatgtatttttgccagcagaccaaagaagtgccgtggacctttggcggcggcaccaaactggaaattaaacgcggcggcggcggcagcggcggcggcgatagcggcggcggcggcagcgaagtgaaactggtggaaagcggcggcgatctggtgaaaccgggcggcagcctgaaactgagctgcgcggcgagcggctttacctttagccattatggcatgagctgggtgcgccagaccccggataaacgcctggaatgggtggcgaccattggcagccgcggcacctatacccattatccggatagcgtgaaaggccgctttaccattagccgcgataacgataaaaacgcgctgtatctgcagatgaacagcctgcgcaccgaagataccgcgatgtattattgcgcgcgcaaaagcgaattttattattatggcaacacctattattatagcgcgatggattattggggccagggcgcgagcgtgaccgtgagcagctaa

SEQ ID NO: 1292 - DNA, 963 bp, synthetic construct
  source 1..963: mol_type = other DNA; note = HA-NLS-DCAF1-(GS)3-3DX.2 nucleic acid
atgtacccatacgatgttccagattacgctccggcggcgaaacgcgtgaaactggatggcagcggcagcggcagccaggcgccgattaactttaccagccgcctgaaccgccgcgcgagctttccgaaatatggcggcgtggatggcggctgctttgatcgccatctgatttttagccgcggcagcggcagcggcagcgatattgtgctgacccagagcccggcgagcctggcggtgagcctgggccagcgcgcgaccattagctgccgcgcgagcgaaagcgtggataactatggctttagctttatgaactggtttcagcagaaaccgggccagccgccgaaactgctgatttatgcgaccagcaaccgcggcagcggcgtgccggcgcgctttagcggcagcggcagcggcaccgattttagcctgaacattcatccggtggaagaagatgatagcgcgatgtatttttgccagcagaccaaagaagtgccgtggacctttggcggcggcaccaaactggaaattaaacgcggcggcggcggcagcggcggcggcgatagcggcggcggcggcagcgaagtgaaactggtggaaagcggcggcgatctggtgaaaccgggcggcagcctgaaactgagctgcgcggcgagcggctttacctttagccattatggcatgagctgggtgcgccagaccccggataaacgcctggaatgggtggcgaccattggcagccgcggcacctatacccattatccggatagcgtgaaaggccgctttaccattagccgcgataacgataaaaacgcgctgtatctgcagatgaacagcctgcgcaccgaagataccgcgatgtattattgcgcgcgcaaaagcgaattttattattatggcaacacctattattatagcgcgatggattattggggccagggcgcgagcgtgaccgtgagcagctaa

SEQ ID NO: 1293 - DNA, 969 bp, synthetic construct
  source 1..969: mol_type = other DNA; note = HA-NLS-DCAF1-(GS)4-3DX.2 nucleic acid
atgtacccatacgatgttccagattacgctccggcggcgaaacgcgtgaaactggatggcagcggcagcggcagccaggcgccgattaactttaccagccgcctgaaccgccgcgcgagctttccgaaatatggcggcgtggatggcggctgctttgatcgccatctgatttttagccgcggcagcggcagcggcagcggcagcgatattgtgctgacccagagcccggcgagcctggcggtgagcctgggccagcgcgcgaccattagctgccgcgcgagcgaaagcgtggataactatggctttagctttatgaactggtttcagcagaaaccgggccagccgccgaaactgctgatttatgcgaccagcaaccgcggcagcggcgtgccggcgcgctttagcggcagcggcagcggcaccgattttagcctgaacattcatccggtggaagaagatgatagcgcgatgtatttttgccagcagaccaaagaagtgccgtggacctttggcggcggcaccaaactggaaattaaacgcggcggcggcggcagcggcggcggcgatagcggcggcggcggcagcgaagtgaaactggtggaaagcggcggcgatctggtgaaaccgggcggcagcctgaaactgagctgcgcggcgagcggctttacctttagccattatggcatgagctgggtgcgccagaccccggataaacgcctggaatgggtggcgaccattggcagccgcggcacctatacccattatccggatagcgtgaaaggccgctttaccattagccgcgataacgataaaaacgcgctgtatctgcagatgaacagcctgcgcaccgaagataccgcgatgtattattgcgcgcgcaaaagcgaattttattattatggcaacacctattattatagcgcgatggattattggggccagggcgcgagcgtgaccgtgagcagctaa

SEQ ID NO: 1294 - DNA, 975 bp, synthetic construct
  source 1..975: mol_type = other DNA; note = HA-NLS-DCAF1-(GS)5-3DX.2 nucleic acid
atgtacccatacgatgttccagattacgctccggcggcgaaacgcgtgaaactggatggcagcggcagcggcagccaggcgccgattaactttaccagccgcctgaaccgccgcgcgagctttccgaaatatggcggcgtggatggcggctgctttgatcgccatctgatttttagccgcggcagcggcagcggcagcggcagcggcagcgatattgtgctgacccagagcccggcgagcctggcggtgagcctgggccagcgcgcgaccattagctgccgcgcgagcgaaagcgtggataactatggctttagctttatgaactggtttcagcagaaaccgggccagccgccgaaactgctgatttatgcgaccagcaaccgcggcagcggcgtgccggcgcgctttagcggcagcggcagcggcaccgattttagcctgaacattcatccggtggaagaagatgatagcgcgatgtatttttgccagcagaccaaagaagtgccgtggacctttggcggcggcaccaaactggaaattaaacgcggcggcggcggcagcggcggcggcgatagcggcggcggcggcagcgaagtgaaactggtggaaagcggcggcgatctggtgaaaccgggcggcagcctgaaactgagctgcgcggcgagcggctttacctttagccattatggcatgagctgggtgcgccagaccccggataaacgcctggaatgggtggcgaccattggcagccgcggcacctatacccattatccggatagcgtgaaaggccgctttaccattagccgcgataacgataaaaacgcgctgtatctgcagatgaacagcctgcgcaccgaagataccgcgatgtattattgcgcgcgcaaaagcgaattttattattatggcaacacctattattatagcgcgatggattattggggccagggcgcgagcgtgaccgtgagcagctaa

SEQ ID NO: 1295 - DNA, 981 bp, synthetic construct
  source 1..981: mol_type = other DNA; note = HA-NLS-DCAF1-(GS)6-3DX.2 nucleic acid
atgtacccatacgatgttccagattacgctccggcggcgaaacgcgtgaaactggatggcagcggcagcggcagccaggcgccgattaactttaccagccgcctgaaccgccgcgcgagctttccgaaatatggcggcgtggatggcggctgctttgatcgccatctgatttttagccgcggcagcggcagcggcagcggcagcggcagcggcagcgatattgtgctgacccagagcccggcgagcctggcggtgagcctgggccagcgcgcgaccattagctgccgcgcgagcgaaagcgtggataactatggctttagctttatgaactggtttcagcagaaaccgggccagccgccgaaactgctgatttatgcgaccagcaaccgcggcagcggcgtgccggcgcgctttagcggcagcggcagcggcaccgattttagcctgaacattcatccggtggaagaagatgatagcgcgatgtatttttgccagcagaccaaagaagtgccgtggacctttggcggcggcaccaaactggaaattaaacgcggcggcggcggcagcggcggcggcgatagcggcggcggcggcagcgaagtgaaactggtggaaagcggcggcgatctggtgaaaccgggcggcagcctgaaactgagctgcgcggcgagcggctttacctttagccattatggcatgagctgggtgcgccagaccccggataaacgcctggaatgggtggcgaccattggcagccgcggcacctatacccattatccggatagcgtgaaaggccgctttaccattagccgcgataacgataaaaacgcgctgtatctgcagatgaacagcctgcgcaccgaagataccgcgatgtattattgcgcgcgcaaaagcgaattttattattatggcaacacctattattatagcgcgatggattattggggccagggcgcgagcgtgaccgtgagcagctaa

SEQ ID NO: 1296 - DNA, 1884 bp, synthetic construct
  source 1..1884: mol_type = other DNA; note = NLS-3DX.2-(GS)1-E6AP nucleic acid
ccggcggcgaaacgcgtgaaactggatggcagcggcagcggcagcgatattgtgctgacccagagcccggcgagcctggcggtgagcctgggccagcgcgcgaccattagctgccgcgcgagcgaaagcgtggataactatggctttagctttatgaactggtttcagcagaaaccgggccagccgccgaaactgctgatttatgcgaccagcaaccgcggcagcggcgtgccggcgcgctttagcggcagcggcagcggcaccgattttagcctgaacattcatccggtggaagaagatgatagcgcgatgtatttttgccagcagaccaaagaagtgccgtggacctttggcggcggcaccaaactggaaattaaacgcggcggcggcggcagcggcggcggcgatagcggcggcggcggcagcgaagtgaaactggtggaaagcggcggcgatctggtgaaaccgggcggcagcctgaaactgagctgcgcggcgagcggctttacctttagccattatggcatgagctgggtgcgccagaccccggataaacgcctggaatgggtggcgaccattggcagccgcggcacctatacccattatccggatagcgtgaaaggccgctttaccattagccgcgataacgataaaaacgcgctgtatctgcagatgaacagcctgcgcaccgaagataccgcgatgtattattgcgcgcgcaaaagcgaattttattattatggcaacacctattattatagcgcgatggattattggggccagggcgcgagcgtgaccgtgagcagcggcagcaatccatatttgagactcaaagttagacgtgaccatatcatagatgatgcacttgtccggctagagatgatcgctatggaaaatcctgcagacttgaagaagcagttgtatgtggaatttgaaggagaacaaggagttgatgagggaggtgtttccaaagaattttttcagctggttgtggaggaaatcttcaatccagatattggtatgttcacatacgatgaatctacaaaattgttttggtttaatccatcttcttttgaaactgagggtcagtttactctgattggcatagtactgggtctggctatttacaataactgtatactggatgtacattttcccatggttgtctacaggaagctaatggggaaaaaaggaacttttcgtgacttgggagactctcacccagttctatatcagagtttaaaagatttattggagtatgaagggaatgtggaagatgacatgatgatcactttccagatatcacagacagatctttttggtaacccaatgatgtatgatctaaaggaaaatggtgataaaattccaattacaaatgaaaacaggaaggaatttgtcaatctttattctgactacattctcaataaatcagtagaaaaacagttcaaggcttttcggagaggttttcatatggtgaccaatgaatctcccttaaagtacttattcagaccagaagaaattgaattgcttatatgtggaagccggaatctagatttccaagcactagaagaaactacagaatatgacggtggctataccagggactctgttctgattagggagttctgggaaatcgttcattcatttacagatgaacagaaaagactcttcttgcagtttacaacgggcacagacagagcacctgtgggaggactaggaaaattaaagatgattatagccaaaaatggcccagacacagaaaggttacctacatctcatacttgctttaatgtgcttttacttccggaatactcaagcaaagaaaaacttaaagagagattgttgaaggccatcacgtatgccaaaggatttggcatgctgtaa

SEQ ID NO: 1297 - DNA, 1890 bp, synthetic construct
  source 1..1890: mol_type = other DNA; note = NLS-3DX.2-(GS)2-E6AP nucleic acid
ccggcggcgaaacgcgtgaaactggatggcagcggcagcggcagcgatattgtgctgacccagagcccggcgagcctggcggtgagcctgggccagcgcgcgaccattagctgccgcgcgagcgaaagcgtggataactatggctttagctttatgaactggtttcagcagaaaccgggccagccgccgaaactgctgatttatgcgaccagcaaccgcggcagcggcgtgccggcgcgctttagcggcagcggcagcggcaccgattttagcctgaacattcatccggtggaagaagatgatagcgcgatgtatttttgccagcagaccaaagaagtgccgtggacctttggcggcggcaccaaactggaaattaaacgcggcggcggcggcagcggcggcggcgatagcggcggcggcggcagcgaagtgaaactggtggaaagcggcggcgatctggtgaaaccgggcggcagcctgaaactgagctgcgcggcgagcggctttacctttagccattatggcatgagctgggtgcgccagaccccggataaacgcctggaatgggtggcgaccattggcagccgcggcacctatacccattatccggatagcgtgaaaggccgctttaccattagccgcgataacgataaaaacgcgctgtatctgcagatgaacagcctgcgcaccgaagataccgcgatgtattattgcgcgcgcaaaagcgaattttattattatggcaacacctattattatagcgcgatggattattggggccagggcgcgagcgtgaccgtgagcagcggcagcggcagcaatccatatttgagactcaaagttagacgtgaccatatcatagatgatgcacttgtccggctagagatgatcgctatggaaaatcctgcagacttgaagaagcagttgtatgtggaatttgaaggagaacaaggagttgatgagggaggtgtttccaaagaattttttcagctggttgtggaggaaatcttcaatccagatattggtatgttcacatacgatgaatctacaaaattgttttggtttaatccatcttcttttgaaactgagggtcagtttactctgattggcatagtactgggtctggctatttacaataactgtatactggatgtacattttcccatggttgtctacaggaagctaatggggaaaaaaggaacttttcgtgacttgggagactctcacccagttctatatcagagtttaaaagatttattggagtatgaagggaatgtggaagatgacatgatgatcactttccagatatcacagacagatctttttggtaacccaatgatgtatgatctaaaggaaaatggtgataaaattccaattacaaatgaaaacaggaaggaatttgtcaatctttattctgactacattctcaataaatcagtagaaaaacagttcaaggcttttcggagaggttttcatatggtgaccaatgaatctcccttaaagtacttattcagaccagaagaaattgaattgcttatatgtggaagccggaatctagatttccaagcactagaagaaactacagaatatgacggtggctataccagggactctgttctgattagggagttctgggaaatcgttcattcatttacagatgaacagaaaagactcttcttgcagtttacaacgggcacagacagagcacctgtgggaggactaggaaaattaaagatgattatagccaaaaatggcccagacacagaaaggttacctacatctcatacttgctttaatgtgcttttacttccggaatactcaagcaaagaaaaacttaaagagagattgttgaaggccatcacgtatgccaaaggatttggcatgctgtaa

SEQ ID NO: 1298 - DNA, 1896 bp, synthetic construct
  source 1..1896: mol_type = other DNA; note = NLS-3DX.2-(GS)3-E6AP nucleic acid
ccggcggcgaaacgcgtgaaactggatggcagcggcagcggcagcgatattgtgctgacccagagcccggcgagcctggcggtgagcctgggccagcgcgcgaccattagctgccgcgcgagcgaaagcgtggataactatggctttagctttatgaactggtttcagcagaaaccgggccagccgccgaaactgctgatttatgcgaccagcaaccgcggcagcggcgtgccggcgcgctttagcggcagcggcagcggcaccgattttagcctgaacattcatccggtggaagaagatgatagcgcgatgtatttttgccagcagaccaaagaagtgccgtggacctttggcggcggcaccaaactggaaattaaacgcggcggcggcggcagcggcggcggcgatagcggcggcggcggcagcgaagtgaaactggtggaaagcggcggcgatctggtgaaaccgggcggcagcctgaaactgagctgcgcggcgagcggctttacctttagccattatggcatgagctgggtgcgccagaccccggataaacgcctggaatgggtggcgaccattggcagccgcggcacctatacccattatccggatagcgtgaaaggccgctttaccattagccgcgataacgataaaaacgcgctgtatctgcagatgaacagcctgcgcaccgaagataccgcgatgtattattgcgcgcgcaaaagcgaattttattattatggcaacacctattattatagcgcgatggattattggggccagggcgcgagcgtgaccgtgagcagcggcagcggcagcggcagcaatccatatttgagactcaaagttagacgtgaccatatcatagatgatgcacttgtccggctagagatgatcgctatggaaaatcctgcagacttgaagaagcagttgtatgtggaatttgaaggagaacaaggagttgatgagggaggtgtttccaaagaattttttcagctggttgtggaggaaatcttcaatccagatattggtatgttcacatacgatgaatctacaaaattgttttggtttaatccatcttcttttgaaactgagggtcagtttactctgattggcatagtactgggtctggctatttacaataactgtatactggatgtacattttcccatggttgtctacaggaagctaatggggaaaaaaggaacttttcgtgacttgggagactctcacccagttctatatcagagtttaaaagatttattggagtatgaagggaatgtggaagatgacatgatgatcactttccagatatcacagacagatctttttggtaacccaatgatgtatgatctaaaggaaaatggtgataaaattccaattacaaatgaaaacaggaaggaatttgtcaatctttattctgactacattctcaataaatcagtagaaaaacagttcaaggcttttcggagaggttttcatatggtgaccaatgaatctcccttaaagtacttattcagaccagaagaaattgaattgcttatatgtggaagccggaatctagatttccaagcactagaagaaactacagaatatgacggtggctataccagggactctgttctgattagggagttctgggaaatcgttcattcatttacagatgaacagaaaagactcttcttgcagtttacaacgggcacagacagagcacctgtgggaggactaggaaaattaaagatgattatagccaaaaatggcccagacacagaaaggttacctacatctcatacttgctttaatgtgcttttacttccggaatactcaagcaaagaaaaacttaaagagagattgttgaaggccatcacgtatgccaaaggatttggcatgctgtaa

SEQ ID NO: 1299 - DNA, 1902 bp, synthetic construct
  source 1..1902: mol_type = other DNA; note = NLS-3DX.2-(GS)4-E6AP nucleic acid
ccggcggcgaaacgcgtgaaactggatggcagcggcagcggcagcgatattgtgctgacccagagcccggcgagcctggcggtgagcctgggccagcgcgcgaccattagctgccgcgcgagcgaaagcgtggataactatggctttagctttatgaactggtttcagcagaaaccgggccagccgccgaaactgctgatttatgcgaccagcaaccgcggcagcggcgtgccggcgcgctttagcggcagcggcagcggcaccgattttagcctgaacattcatccggtggaagaagatgatagcgcgatgtatttttgccagcagaccaaagaagtgccgtggacctttggcggcggcaccaaactggaaattaaacgcggcggcggcggcagcggcggcggcgatagcggcggcggcggcagcgaagtgaaactggtggaaagcggcggcgatctggtgaaaccgggcggcagcctgaaactgagctgcgcggcgagcggctttacctttagccattatggcatgagctgggtgcgccagaccccggataaacgcctggaatgggtggcgaccattggcagccgcggcacctatacccattatccggatagcgtgaaaggccgctttaccattagccgcgataacgataaaaacgcgctgtatctgcagatgaacagcctgcgcaccgaagataccgcgatgtattattgcgcgcgcaaaagcgaattttattattatggcaacacctattattatagcgcgatggattattggggccagggcgcgagcgtgaccgtgagcagcggcagcggcagcggcagcggcagcaatccatatttgagactcaaagttagacgtgaccatatcatagatgatgcacttgtccggctagagatgatcgctatggaaaatcctgcagacttgaagaagcagttgtatgtggaatttgaaggagaacaaggagttgatgagggaggtgtttccaaagaattttttcagctggttgtggaggaaatcttcaatccagatattggtatgttcacatacgatgaatctacaaaattgttttggtttaatccatcttcttttgaaactgagggtcagtttactctgattggcatagtactgggtctggctatttacaataactgtatactggatgtacattttcccatggttgtctacaggaagctaatggggaaaaaaggaacttttcgtgacttgggagactctcacccagttctatatcagagtttaaaagatttattggagtatgaagggaatgtggaagatgacatgatgatcactttccagatatcacagacagatctttttggtaacccaatgatgtatgatctaaaggaaaatggtgataaaattccaattacaaatgaaaacaggaaggaatttgtcaatctttattctgactacattctcaataaatcagtagaaaaacagttcaaggcttttcggagaggttttcatatggtgaccaatgaatctcccttaaagtacttattcagaccagaagaaattgaattgcttatatgtggaagccggaatctagatttccaagcactagaagaaactacagaatatgacggtggctataccagggactctgttctgattagggagttctgggaaatcgttcattcatttacagatgaacagaaaagactcttcttgcagtttacaacgggcacagacagagcacctgtgggaggactaggaaaattaaagatgattatagccaaaaatggcccagacacagaaaggttacctacatctcatacttgctttaatgtgcttttacttccggaatactcaagcaaagaaaaacttaaagagagattgttgaaggccatcacgtatgccaaaggatttggcatgctgtaa

SEQ ID NO: 1300 - DNA, 1908 bp, synthetic construct
  source 1..1908: mol_type = other DNA; note = NLS-3DX.2-(GS)5-E6AP nucleic acid
ccggcggcgaaacgcgtgaaactggatggcagcggcagcggcagcgatattgtgctgacccagagcccggcgagcctggcggtgagcctgggccagcgcgcgaccattagctgccgcgcgagcgaaagcgtggataactatggctttagctttatgaactggtttcagcagaaaccgggccagccgccgaaactgctgatttatgcgaccagcaaccgcggcagcggcgtgccggcgcgctttagcggcagcggcagcggcaccgattttagcctgaacattcatccggtggaagaagatgatagcgcgatgtatttttgccagcagaccaaagaagtgccgtggacctttggcggcggcaccaaactggaaattaaacgcggcggcggcggcagcggcggcggcgatagcggcggcggcggcagcgaagtgaaactggtggaaagcggcggcgatctggtgaaaccgggcggcagcctgaaactgagctgcgcggcgagcggctttacctttagccattatggcatgagctgggtgcgccagaccccggataaacgcctggaatgggtggcgaccattggcagccgcggcacctatacccattatccggatagcgtgaaaggccgctttaccattagccgcgataacgataaaaacgcgctgtatctgcagatgaacagcctgcgcaccgaagataccgcgatgtattattgcgcgcgcaaaagcgaattttattattatggcaacacctattattatagcgcgatggattattggggccagggcgcgagcgtgaccgtgagcagcggcagcggcagcggcagcggcagcggcagcaatccatatttgagactcaaagttagacgtgaccatatcatagatgatgcacttgtccggctagagatgatcgctatggaaaatcctgcagacttgaagaagcagttgtatgtggaatttgaaggagaacaaggagttgatgagggaggtgtttccaaagaattttttcagctggttgtggaggaaatcttcaatccagatattggtatgttcacatacgatgaatctacaaaattgttttggtttaatccatcttcttttgaaactgagggtcagtttactctgattggcatagtactgggtctggctatttacaataactgtatactggatgtacattttcccatggttgtctacaggaagctaatggggaaaaaaggaacttttcgtgacttgggagactctcacccagttctatatcagagtttaaaagatttattggagtatgaagggaatgtggaagatgacatgatgatcactttccagatatcacagacagatctttttggtaacccaatgatgtatgatctaaaggaaaatggtgataaaattccaattacaaatgaaaacaggaaggaatttgtcaatctttattctgactacattctcaataaatcagtagaaaaacagttcaaggcttttcggagaggttttcatatggtgaccaatgaatctcccttaaagtacttattcagaccagaagaaattgaattgcttatatgtggaagccggaatctagatttccaagcactagaagaaactacagaatatgacggtggctataccagggactctgttctgattagggagttctgggaaatcgttcattcatttacagatgaacagaaaagactcttcttgcagtttacaacgggcacagacagagcacctgtgggaggactaggaaaattaaagatgattatagccaaaaatggcccagacacagaaaggttacctacatctcatacttgctttaatgtgcttttacttccggaatactcaagcaaagaaaaacttaaagagagattgttgaaggccatcacgtatgccaaaggatttggcatgctgtaa

SEQ ID NO: 1301 - DNA, 1914 bp, synthetic construct
  source 1..1914: mol_type = other DNA; note = NLS-3DX.2-(GS)6-E6AP nucleic acid
ccggcggcgaaacgcgtgaaactggatggcagcggcagcggcagcgatattgtgctgacccagagcccggcgagcctggcggtgagcctgggccagcgcgcgaccattagctgccgcgcgagcgaaagcgtggataactatggctttagctttatgaactggtttcagcagaaaccgggccagccgccgaaactgctgatttatgcgaccagcaaccgcggcagcggcgtgccggcgcgctttagcggcagcggcagcggcaccgattttagcctgaacattcatccggtggaagaagatgatagcgcgatgtatttttgccagcagaccaaagaagtgccgtggacctttggcggcggcaccaaactggaaattaaacgcggcggcggcggcagcggcggcggcgatagcggcggcggcggcagcgaagtgaaactggtggaaagcggcggcgatctggtgaaaccgggcggcagcctgaaactgagctgcgcggcgagcggctttacctttagccattatggcatgagctgggtgcgccagaccccggataaacgcctggaatgggtggcgaccattggcagccgcggcacctatacccattatccggatagcgtgaaaggccgctttaccattagccgcgataacgataaaaacgcgctgtatctgcagatgaacagcctgcgcaccgaagataccgcgatgtattattgcgcgcgcaaaagcgaattttattattatggcaacacctattattatagcgcgatggattattggggccagggcgcgagcgtgaccgtgagcagcggcagcggcagcggcagcggcagcggcagcggcagcaatccatatttgagactcaaagttagacgtgaccatatcatagatgatgcacttgtccggctagagatgatcgctatggaaaatcctgcagacttgaagaagcagttgtatgtggaatttgaaggagaacaaggagttgatgagggaggtgtttccaaagaattttttcagctggttgtggaggaaatcttcaatccagatattggtatgttcacatacgatgaatctacaaaattgttttggtttaatccatcttcttttgaaactgagggtcagtttactctgattggcatagtactgggtctggctatttacaataactgtatactggatgtacattttcccatggttgtctacaggaagctaatggggaaaaaaggaacttttcgtgacttgggagactctcacccagttctatatcagagtttaaaagatttattggagtatgaagggaatgtggaagatgacatgatgatcactttccagatatcacagacagatctttttggtaacccaatgatgtatgatctaaaggaaaatggtgataaaattccaattacaaatgaaaacaggaaggaatttgtcaatctttattctgactacattctcaataaatcagtagaaaaacagttcaaggcttttcggagaggttttcatatggtgaccaatgaatctcccttaaagtacttattcagaccagaagaaattgaattgcttatatgtggaagccggaatctagatttccaagcactagaagaaactacagaatatgacggtggctataccagggactctgttctgattagggagttctgggaaatcgttcattcatttacagatgaacagaaaagactcttcttgcagtttacaacgggcacagacagagcacctgtgggaggactaggaaaattaaagatgattatagccaaaaatggcccagacacagaaaggttacctacatctcatacttgctttaatgtgcttttacttccggaatactcaagcaaagaaaaacttaaagagagattgttgaaggccatcacgtatgccaaaggatttggcatgctgtaa

SEQ ID NO: 1302 - DNA, 1914 bp, synthetic construct
  source 1..1914: mol_type = other DNA; note = HA-NLS-3DX.2-(GS)1-E6AP nucleic acid
atgtacccatacgatgttccagattacgctccggcggcgaaacgcgtgaaactggatggcagcggcagcggcagcgatattgtgctgacccagagcccggcgagcctggcggtgagcctgggccagcgcgcgaccattagctgccgcgcgagcgaaagcgtggataactatggctttagctttatgaactggtttcagcagaaaccgggccagccgccgaaactgctgatttatgcgaccagcaaccgcggcagcggcgtgccggcgcgctttagcggcagcggcagcggcaccgattttagcctgaacattcatccggtggaagaagatgatagcgcgatgtatttttgccagcagaccaaagaagtgccgtggacctttggcggcggcaccaaactggaaattaaacgcggcggcggcggcagcggcggcggcgatagcggcggcggcggcagcgaagtgaaactggtggaaagcggcggcgatctggtgaaaccgggcggcagcctgaaactgagctgcgcggcgagcggctttacctttagccattatggcatgagctgggtgcgccagaccccggataaacgcctggaatgggtggcgaccattggcagccgcggcacctatacccattatccggatagcgtgaaaggccgctttaccattagccgcgataacgataaaaacgcgctgtatctgcagatgaacagcctgcgcaccgaagataccgcgatgtattattgcgcgcgcaaaagcgaattttattattatggcaacacctattattatagcgcgatggattattggggccagggcgcgagcgtgaccgtgagcagcggcagcaatccatatttgagactcaaagttagacgtgaccatatcatagatgatgcacttgtccggctagagatgatcgctatggaaaatcctgcagacttgaagaagcagttgtatgtggaatttgaaggagaacaaggagttgatgagggaggtgtttccaaagaattttttcagctggttgtggaggaaatcttcaatccagatattggtatgttcacatacgatgaatctacaaaattgttttggtttaatccatcttcttttgaaactgagggtcagtttactctgattggcatagtactgggtctggctatttacaataactgtatactggatgtacattttcccatggttgtctacaggaagctaatggggaaaaaaggaacttttcgtgacttgggagactctcacccagttctatatcagagtttaaaagatttattggagtatgaagggaatgtggaagatgacatgatgatcactttccagatatcacagacagatctttttggtaacccaatgatgtatgatctaaaggaaaatggtgataaaattccaattacaaatgaaaacaggaaggaatttgtcaatctttattctgactacattctcaataaatcagtagaaaaacagttcaaggcttttcggagaggttttcatatggtgaccaatgaatctcccttaaagtacttattcagaccagaagaaattgaattgcttatatgtggaagccggaatctagatttccaagcactagaagaaactacagaatatgacggtggctataccagggactctgttctgattagggagttctgggaaatcgttcattcatttacagatgaacagaaaagactcttcttgcagtttacaacgggcacagacagagcacctgtgggaggactaggaaaattaaagatgattatagccaaaaatggcccagacacagaaaggttacctacatctcatacttgctttaatgtgcttttacttccggaatactcaagcaaagaaaaacttaaagagagattgttgaaggccatcacgtatgccaaaggatttggcatgctgtaa

SEQ ID NO: 1303 - DNA, 1920 bp, synthetic construct
  source 1..1920: mol_type = other DNA; note = HA-NLS-3DX.2-(GS)2-E6AP nucleic acid
atgtacccatacgatgttccagattacgctccggcggcgaaacgcgtgaaactggatggcagcggcagcggcagcgatattgtgctgacccagagcccggcgagcctggcggtgagcctgggccagcgcgcgaccattagctgccgcgcgagcgaaagcgtggataactatggctttagctttatgaactggtttcagcagaaaccgggccagccgccgaaactgctgatttatgcgaccagcaaccgcggcagcggcgtgccggcgcgctttagcggcagcggcagcggcaccgattttagcctgaacattcatccggtggaagaagatgatagcgcgatgtatttttgccagcagaccaaagaagtgccgtggacctttggcggcggcaccaaactggaaattaaacgcggcggcggcggcagcggcggcggcgatagcggcggcggcggcagcgaagtgaaactggtggaaagcggcggcgatctggtgaaaccgggcggcagcctgaaactgagctgcgcggcgagcggctttacctttagccattatggcatgagctgggtgcgccagaccccggataaacgcctggaatgggtggcgaccattggcagccgcggcacctatacccattatccggatagcgtgaaaggccgctttaccattagccgcgataacgataaaaacgcgctgtatctgcagatgaacagcctgcgcaccgaagataccgcgatgtattattgcgcgcgcaaaagcgaattttattattatggcaacacctattattatagcgcgatggattattggggccagggcgcgagcgtgaccgtgagcagcggcagcggcagcaatccatatttgagactcaaagttagacgtgaccatatcatagatgatgcacttgtccggctagagatgatcgctatggaaaatcctgcagacttgaagaagcagttgtatgtggaatttgaaggagaacaaggagttgatgagggaggtgtttccaaagaattttttcagctggttgtggaggaaatcttcaatccagatattggtatgttcacatacgatgaatctacaaaattgttttggtttaatccatcttcttttgaaactgagggtcagtttactctgattggcatagtactgggtctggctatttacaataactgtatactggatgtacattttcccatggttgtctacaggaagctaatggggaaaaaaggaacttttcgtgacttgggagactctcacccagttctatatcagagtttaaaagatttattggagtatgaagggaatgtggaagatgacatgatgatcactttccagatatcacagacagatctttttggtaacccaatgatgtatgatctaaaggaaaatggtgataaaattccaattacaaatgaaaacaggaaggaatttgtcaatctttattctgactacattctcaataaatcagtagaaaaacagttcaaggcttttcggagaggttttcatatggtgaccaatgaatctcccttaaagtacttattcagaccagaagaaattgaattgcttatatgtggaagccggaatctagatttccaagcactagaagaaactacagaatatgacggtggctataccagggactctgttctgattagggagttctgggaaatcgttcattcatttacagatgaacagaaaagactcttcttgcagtttacaacgggcacagacagagcacctgtgggaggactaggaaaattaaagatgattatagccaaaaatggcccagacacagaaaggttacctacatctcatacttgctttaatgtgcttttacttccggaatactcaagcaaagaaaaacttaaagagagattgttgaaggccatcacgtatgccaaaggatttggcatgctgtaa

SEQ ID NO: 1304 - DNA, 1926 bp, synthetic construct
  source 1..1926: mol_type = other DNA; note = HA-NLS-3DX.2-(GS)3-E6AP nucleic acid
atgtacccatacgatgttccagattacgctccggcggcgaaacgcgtgaaactggatggcagcggcagcggcagcgatattgtgctgacccagagcccggcgagcctggcggtgagcctgggccagcgcgcgaccattagctgccgcgcgagcgaaagcgtggataactatggctttagctttatgaactggtttcagcagaaaccgggccagccgccgaaactgctgatttatgcgaccagcaaccgcggcagcggcgtgccggcgcgctttagcggcagcggcagcggcaccgattttagcctgaacattcatccggtggaagaagatgatagcgcgatgtatttttgccagcagaccaaagaagtgccgtggacctttggcggcggcaccaaactggaaattaaacgcggcggcggcggcagcggcggcggcgatagcggcggcggcggcagcgaagtgaaactggtggaaagcggcggcgatctggtgaaaccgggcggcagcctgaaactgagctgcgcggcgagcggctttacctttagccattatggcatgagctgggtgcgccagaccccggataaacgcctggaatgggtggcgaccattggcagccgcggcacctatacccattatccggatagcgtgaaaggccgctttaccattagccgcgataacgataaaaacgcgctgtatctgcagatgaacagcctgcgcaccgaagataccgcgatgtattattgcgcgcgcaaaagcgaattttattattatggcaacacctattattatagcgcgatggattattggggccagggcgcgagcgtgaccgtgagcagcggcagcggcagcggcagcaatccatatttgagactcaaagttagacgtgaccatatcatagatgatgcacttgtccggctagagatgatcgctatggaaaatcctgcagacttgaagaagcagttgtatgtggaatttgaaggagaacaaggagttgatgagggaggtgtttccaaagaattttttcagctggttgtggaggaaatcttcaatccagatattggtatgttcacatacgatgaatctacaaaattgttttggtttaatccatcttcttttgaaactgagggtcagtttactctgattggcatagtactgggtctggctatttacaataactgtatactggatgtacattttcccatggttgtctacaggaagctaatggggaaaaaaggaacttttcgtgacttgggagactctcacccagttctatatcagagtttaaaagatttattggagtatgaagggaatgtggaagatgacatgatgatcactttccagatatcacagacagatctttttggtaacccaatgatgtatgatctaaaggaaaatggtgataaaattccaattacaaatgaaaacaggaaggaatttgtcaatctttattctgactacattctcaataaatcagtagaaaaacagttcaaggcttttcggagaggttttcatatggtgaccaatgaatctcccttaaagtacttattcagaccagaagaaattgaattgcttatatgtggaagccggaatctagatttccaagcactagaagaaactacagaatatgacggtggctataccagggactctgttctgattagggagttctgggaaatcgttcattcatttacagatgaacagaaaagactcttcttgcagtttacaacgggcacagacagagcacctgtgggaggactaggaaaattaaagatgattatagccaaaaatggcccagacacagaaaggttacctacatctcatacttgctttaatgtgcttttacttccggaatactcaagcaaagaaaaacttaaagagagattgttgaaggccatcacgtatgccaaaggatttggcatgctgtaa

SEQ ID NO: 1305 - DNA, 1932 bp, synthetic construct
  source 1..1932: mol_type = other DNA; note = HA-NLS-3DX.2-(GS)4-E6AP nucleic acid
atgtacccatacgatgttccagattacgctccggcggcgaaacgcgtgaaactggatggcagcggcagcggcagcgatattgtgctgacccagagcccggcgagcctggcggtgagcctgggccagcgcgcgaccattagctgccgcgcgagcgaaagcgtggataactatggctttagctttatgaactggtttcagcagaaaccgggccagccgccgaaactgctgatttatgcgaccagcaaccgcggcagcggcgtgccggcgcgctttagcggcagcggcagcggcaccgattttagcctgaacattcatccggtggaagaagatgatagcgcgatgtatttttgccagcagaccaaagaagtgccgtggacctttggcggcggcaccaaactggaaattaaacgcggcggcggcggcagcggcggcggcgatagcggcggcggcggcagcgaagtgaaactggtggaaagcggcggcgatctggtgaaaccgggcggcagcctgaaactgagctgcgcggcgagcggctttacctttagccattatggcatgagctgggtgcgccagaccccggataaacgcctggaatgggtggcgaccattggcagccgcggcacctatacccattatccggatagcgtgaaaggccgctttaccattagccgcgataacgataaaaacgcgctgtatctgcagatgaacagcctgcgcaccgaagataccgcgatgtattattgcgcgcgcaaaagcgaattttattattatggcaacacctattattatagcgcgatggattattggggccagggcgcgagcgtgaccgtgagcagcggcagcggcagcggcagcggcagcaatccatatttgagactcaaagttagacgtgaccatatcatagatgatgcacttgtccggctagagatgatcgctatggaaaatcctgcagacttgaagaagcagttgtatgtggaatttgaaggagaacaaggagttgatgagggaggtgtttccaaagaattttttcagctggttgtggaggaaatcttcaatccagatattggtatgttcacatacgatgaatctacaaaattgttttggtttaatccatcttcttttgaaactgagggtcagtttactctgattggcatagtactgggtctggctatttacaataactgtatactggatgtacattttcccatggttgtctacaggaagctaatggggaaaaaaggaacttttcgtgacttgggagactctcacccagttctatatcagagtttaaaagatttattggagtatgaagggaatgtggaagatgacatgatgatcactttccagatatcacagacagatctttttggtaacccaatgatgtatgatctaaaggaaaatggtgataaaattccaattacaaatgaaaacaggaaggaatttgtcaatctttattctgactacattctcaataaatcagtagaaaaacagttcaaggcttttcggagaggttttcatatggtgaccaatgaatctcccttaaagtacttattcagaccagaagaaattgaattgcttatatgtggaagccggaatctagatttccaagcactagaagaaactacagaatatgacggtggctataccagggactctgttctgattagggagttctgggaaatcgttcattcatttacagatgaacagaaaagactcttcttgcagtttacaacgggcacagacagagcacctgtgggaggactaggaaaattaaagatgattatagccaaaaatggcccagacacagaaaggttacctacatctcatacttgctttaatgtgcttttacttccggaatactcaagcaaagaaaaacttaaagagagattgttgaaggccatcacgtatgccaaaggatttggcatgctgtaa

SEQ ID NO: 1306 - DNA, 1938 bp, synthetic construct
  source 1..1938: mol_type = other DNA; note = HA-NLS-3DX.2-(GS)5-E6AP nucleic acid
atgtacccatacgatgttccagattacgctccggcggcgaaacgcgtgaaactggatggcagcggcagcggcagcgatattgtgctgacccagagcccggcgagcctggcggtgagcctgggccagcgcgcgaccattagctgccgcgcgagcgaaagcgtggataactatggctttagctttatgaactggtttcagcagaaaccgggccagccgccgaaactgctgatttatgcgaccagcaaccgcggcagcggcgtgccggcgcgctttagcggcagcggcagcggcaccgattttagcctgaacattcatccggtggaagaagatgatagcgcgatgtatttttgccagcagaccaaagaagtgccgtggacctttggcggcggcaccaaactggaaattaaacgcggcggcggcggcagcggcggcggcgatagcggcggcggcggcagcgaagtgaaactggtggaaagcggcggcgatctggtgaaaccgggcggcagcctgaaactgagctgcgcggcgagcggctttacctttagccattatggcatgagctgggtgcgccagaccccggataaacgcctggaatgggtggcgaccattggcagccgcggcacctatacccattatccggatagcgtgaaaggccgctttaccattagccgcgataacgataaaaacgcgctgtatctgcagatgaacagcctgcgcaccgaagataccgcgatgtattattgcgcgcgcaaaagcgaattttattattatggcaacacctattattatagcgcgatggattattggggccagggcgcgagcgtgaccgtgagcagcggcagcggcagcggcagcggcagcggcagcaatccatatttgagactcaaagttagacgtgaccatatcatagatgatgcacttgtccggctagagatgatcgctatggaaaatcctgcagacttgaagaagcagttgtatgtggaatttgaaggagaacaaggagttgatgagggaggtgtttccaaagaattttttcagctggttgtggaggaaatcttcaatccagatattggtatgttcacatacgatgaatctacaaaattgttttggtttaatccatcttcttttgaaactgagggtcagtttactctgattggcatagtactgggtctggctatttacaataactgtatactggatgtacattttcccatggttgtctacaggaagctaatggggaaaaaaggaacttttcgtgacttgggagactctcacccagttctatatcagagtttaaaagatttattggagtatgaagggaatgtggaagatgacatgatgatcactttccagatatcacagacagatctttttggtaacccaatgatgtatgatctaaaggaaaatggtgataaaattccaattacaaatgaaaacaggaaggaatttgtcaatctttattctgactacattctcaataaatcagtagaaaaacagttcaaggcttttcggagaggttttcatatggtgaccaatgaatctcccttaaagtacttattcagaccagaagaaattgaattgcttatatgtggaagccggaatctagatttccaagcactagaagaaactacagaatatgacggtggctataccagggactctgttctgattagggagttctgggaaatcgttcattcatttacagatgaacagaaaagactcttcttgcagtttacaacgggcacagacagagcacctgtgggaggactaggaaaattaaagatgattatagccaaaaatggcccagacacagaaaggttacctacatctcatacttgctttaatgtgcttttacttccggaatactcaagcaaagaaaaacttaaagagagattgttgaaggccatcacgtatgccaaaggatttggcatgctgtaa

SEQ ID NO: 1307 - DNA, 1944 bp, synthetic construct
  source 1..1944: mol_type = other DNA; note = HA-NLS-3DX.2-(GS)6-E6AP nucleic acid
atgtacccatacgatgttccagattacgctccggcggcgaaacgcgtgaaactggatggcagcggcagcggcagcgatattgtgctgacccagagcccggcgagcctggcggtgagcctgggccagcgcgcgaccattagctgccgcgcgagcgaaagcgtggataactatggctttagctttatgaactggtttcagcagaaaccgggccagccgccgaaactgctgatttatgcgaccagcaaccgcggcagcggcgtgccggcgcgctttagcggcagcggcagcggcaccgattttagcctgaacattcatccggtggaagaagatgatagcgcgatgtatttttgccagcagaccaaagaagtgccgtggacctttggcggcggcaccaaactggaaattaaacgcggcggcggcggcagcggcggcggcgatagcggcggcggcggcagcgaagtgaaactggtggaaagcggcggcgatctggtgaaaccgggcggcagcctgaaactgagctgcgcggcgagcggctttacctttagccattatggcatgagctgggtgcgccagaccccggataaacgcctggaatgggtggcgaccattggcagccgcggcacctatacccattatccggatagcgtgaaaggccgctttaccattagccgcgataacgataaaaacgcgctgtatctgcagatgaacagcctgcgcaccgaagataccgcgatgtattattgcgcgcgcaaaagcgaattttattattatggcaacacctattattatagcgcgatggattattggggccagggcgcgagcgtgaccgtgagcagcggcagcggcagcggcagcggcagcggcagcggcagcaatccatatttgagactcaaagttagacgtgaccatatcatagatgatgcacttgtccggctagagatgatcgctatggaaaatcctgcagacttgaagaagcagttgtatgtggaatttgaaggagaacaaggagttgatgagggaggtgtttccaaagaattttttcagctggttgtggaggaaatcttcaatccagatattggtatgttcacatacgatgaatctacaaaattgttttggtttaatccatcttcttttgaaactgagggtcagtttactctgattggcatagtactgggtctggctatttacaataactgtatactggatgtacattttcccatggttgtctacaggaagctaatggggaaaaaaggaacttttcgtgacttgggagactctcacccagttctatatcagagtttaaaagatttattggagtatgaagggaatgtggaagatgacatgatgatcactttccagatatcacagacagatctttttggtaacccaatgatgtatgatctaaaggaaaatggtgataaaattccaattacaaatgaaaacaggaaggaatttgtcaatctttattctgactacattctcaataaatcagtagaaaaacagttcaaggcttttcggagaggttttcatatggtgaccaatgaatctcccttaaagtacttattcagaccagaagaaattgaattgcttatatgtggaagccggaatctagatttccaagcactagaagaaactacagaatatgacggtggctataccagggactctgttctgattagggagttctgggaaatcgttcattcatttacagatgaacagaaaagactcttcttgcagtttacaacgggcacagacagagcacctgtgggaggactaggaaaattaaagatgattatagccaaaaatggcccagacacagaaaggttacctacatctcatacttgctttaatgtgcttttacttccggaatactcaagcaaagaaaaacttaaagagagattgttgaaggccatcacgtatgccaaaggatttggcatgctgtaa

SEQ ID NO: 1308 - DNA, 1872 bp, synthetic construct
  source 1..1872: mol_type = other DNA; note = FBXW7a-(GS)1-3DX.2 nucleic acid
aatcaggaactgctctctgtgggcagcaaaagacgacgaactggaggctctctgagaggtaacccttcctcaagccaggtagatgaagaacagatgaatcgtgtggtagaggaggaacagcaacagcaactcagacaacaagaggaggagcacactgcaaggaatggtgaagttgttggagtagaacctagacctggaggccaaaatgattcccagcaaggacagttggaagaaaacaataatagatttatttcggtagatgaggactcctcaggaaaccaagaagaacaagaggaagatgaagaacatgctggtgaacaagatgaggaggatgaggaggaggaggagatggaccaggagagtgacgattttgatcagtctgatgatagtagcagagaagatgaacatacacatactaacagtgtcacgaactccagtagtattgtggacctgcccgttcaccaactctcctccccattctatacaaaaacaacaaaaatgaaaagaaagttggaccatggttctgaggtccgctctttttctttgggaaagaaaccatgcaaagtctcagaatatacaagtaccactgggcttgtaccatgttcagcaacaccaacaacttttggggacctcagagcagccaatggccaagggcaacaacgacgccgaattacatctgtccagccacctacaggcctccaggaatggctaaaaatgtttcagagctggagtggaccagagaaattgcttgctttagatgaactcattgatagttgtgaaccaacacaagtaaaacatatgatgcaagtgatagaaccccagtttcaacgagacttcatttcattgctccctaaagagttggcactctatgtgctttcattcctggaacccaaagacctgctacaagcagctcagacatgtcgctactggagaattttggctgaagacaaccttctctggagagagaaatgcaaagaagaggggattgatgaaccattgcacatcaagagaagaaaagtaataaaaccaggtttcatacacagtccatggaaaagtgcatacatcagacagcacagaattgatactaactcgaggcgaggaggcagcgatattgtgctgacccagagcccggcgagcctggcggtgagcctgggccagcgcgcgaccattagctgccgcgcgagcgaaagcgtggataactatggctttagctttatgaactggtttcagcagaaaccgggccagccgccgaaactgctgatttatgcgaccagcaaccgcggcagcggcgtgccggcgcgctttagcggcagcggcagcggcaccgattttagcctgaacattcatccggtggaagaagatgatagcgcgatgtatttttgccagcagaccaaagaagtgccgtggacctttggcggcggcaccaaactggaaattaaacgcggcggcggcggcagcggcggcggcgatagcggcggcggcggcagcgaagtgaaactggtggaaagcggcggcgatctggtgaaaccgggcggcagcctgaaactgagctgcgcggcgagcggctttacctttagccattatggcatgagctgggtgcgccagaccccggataaacgcctggaatgggtggcgaccattggcagccgcggcacctatacccattatccggatagcgtgaaaggccgctttaccattagccgcgataacgataaaaacgcgctgtatctgcagatgaacagcctgcgcaccgaagataccgcgatgtattattgcgcgcgcaaaagcgaattttattattatggcaacacctattattatagcgcgatggattattggggccagggcgcgagcgtgaccgtgagcagctaa

SEQ ID NO: 1309 - DNA, 1878 bp, synthetic construct
  source 1..1878: mol_type = other DNA; note = FBXW7a-(GS)2-3DX.2 nucleic acid
aatcaggaactgctctctgtgggcagcaaaagacgacgaactggaggctctctgagaggtaacccttcctcaagccaggtagatgaagaacagatgaatcgtgtggtagaggaggaacagcaacagcaactcagacaacaagaggaggagcacactgcaaggaatggtgaagttgttggagtagaacctagacctggaggccaaaatgattcccagcaaggacagttggaagaaaacaataatagatttatttcggtagatgaggactcctcaggaaaccaagaagaacaagaggaagatgaagaacatgctggtgaacaagatgaggaggatgaggaggaggaggagatggaccaggagagtgacgattttgatcagtctgatgatagtagcagagaagatgaacatacacatactaacagtgtcacgaactccagtagtattgtggacctgcccgttcaccaactctcctccccattctatacaaaaacaacaaaaatgaaaagaaagttggaccatggttctgaggtccgctctttttctttgggaaagaaaccatgcaaagtctcagaatatacaagtaccactgggcttgtaccatgttcagcaacaccaacaacttttggggacctcagagcagccaatggccaagggcaacaacgacgccgaattacatctgtccagccacctacaggcctccaggaatggctaaaaatgtttcagagctggagtggaccagagaaattgcttgctttagatgaactcattgatagttgtgaaccaacacaagtaaaacatatgatgcaagtgatagaaccccagtttcaacgagacttcatttcattgctccctaaagagttggcactctatgtgctttcattcctggaacccaaagacctgctacaagcagctcagacatgtcgctactggagaattttggctgaagacaaccttctctggagagagaaatgcaaagaagaggggattgatgaaccattgcacatcaagagaagaaaagtaataaaaccaggtttcatacacagtccatggaaaagtgcatacatcagacagcacagaattgatactaactcgaggcgaggaggcagcggcagcgatattgtgctgacccagagcccggcgagcctggcggtgagcctgggccagcgcgcgaccattagctgccgcgcgagcgaaagcgtggataactatggctttagctttatgaactggtttcagcagaaaccgggccagccgccgaaactgctgatttatgcgaccagcaaccgcggcagcggcgtgccggcgcgctttagcggcagcggcagcggcaccgattttagcctgaacattcatccggtggaagaagatgatagcgcgatgtatttttgccagcagaccaaagaagtgccgtggacctttggcggcggcaccaaactggaaattaaacgcggcggcggcggcagcggcggcggcgatagcggcggcggcggcagcgaagtgaaactggtggaaagcggcggcgatctggtgaaaccgggcggcagcctgaaactgagctgcgcggcgagcggctttacctttagccattatggcatgagctgggtgcgccagaccccggataaacgcctggaatgggtggcgaccattggcagccgcggcacctatacccattatccggatagcgtgaaaggccgctttaccattagccgcgataacgataaaaacgcgctgtatctgcagatgaacagcctgcgcaccgaagataccgcgatgtattattgcgcgcgcaaaagcgaattttattattatggcaacacctattattatagcgcgatggattattggggccagggcgcgagcgtgaccgtgagcagctaa

SEQ ID NO: 1310 - DNA, 1884 bp, synthetic construct
  source 1..1884: mol_type = other DNA; note = FBXW7a-(GS)3-3DX.2 nucleic acid
aatcaggaactgctctctgtgggcagcaaaagacgacgaactggaggctctctgagaggtaacccttcctcaagccaggtagatgaagaacagatgaatcgtgtggtagaggaggaacagcaacagcaactcagacaacaagaggaggagcacactgcaaggaatggtgaagttgttggagtagaacctagacctggaggccaaaatgattcccagcaaggacagttggaagaaaacaataatagatttatttcggtagatgaggactcctcaggaaaccaagaagaacaagaggaagatgaagaacatgctggtgaacaagatgaggaggatgaggaggaggaggagatggaccaggagagtgacgattttgatcagtctgatgatagtagcagagaagatgaacatacacatactaacagtgtcacgaactccagtagtattgtggacctgcccgttcaccaactctcctccccattctatacaaaaacaacaaaaatgaaaagaaagttggaccatggttctgaggtccgctctttttctttgggaaagaaaccatgcaaagtctcagaatatacaagtaccactgggcttgtaccatgttcagcaacaccaacaacttttggggacctcagagcagccaatggccaagggcaacaacgacgccgaattacatctgtccagccacctacaggcctccaggaatggctaaaaatgtttcagagctggagtggaccagagaaattgcttgctttagatgaactcattgatagttgtgaaccaacacaagtaaaacatatgatgcaagtgatagaaccccagtttcaacgagacttcatttcattgctccctaaagagttggcactctatgtgctttcattcctggaacccaaagacctgctacaagcagctcagacatgtcgctactggagaattttggctgaagacaaccttctctggagagagaaatgcaaagaagaggggattgatgaaccattgcacatcaagagaagaaaagtaataaaaccaggtttcatacacagtccatggaaaagtgcatacatcagacagcacagaattgatactaactcgaggcgaggaggcagcggcagcggcagcgatattgtgctgacccagagcccggcgagcctggcggtgagcctgggccagcgcgcgaccattagctgccgcgcgagcgaaagcgtggataactatggctttagctttatgaactggtttcagcagaaaccgggccagccgccgaaactgctgatttatgcgaccagcaaccgcggcagcggcgtgccggcgcgctttagcggcagcggcagcggcaccgattttagcctgaacattcatccggtggaagaagatgatagcgcgatgtatttttgccagcagaccaaagaagtgccgtggacctttggcggcggcaccaaactggaaattaaacgcggcggcggcggcagcggcggcggcgatagcggcggcggcggcagcgaagtgaaactggtggaaagcggcggcgatctggtgaaaccgggcggcagcctgaaactgagctgcgcggcgagcggctttacctttagccattatggcatgagctgggtgcgccagaccccggataaacgcctggaatgggtggcgaccattggcagccgcggcacctatacccattatccggatagcgtgaaaggccgctttaccattagccgcgataacgataaaaacgcgctgtatctgcagatgaacagcctgcgcaccgaagataccgcgatgtattattgcgcgcgcaaaagcgaattttattattatggcaacacctattattatagcgcgatggattattggggccagggcgcgagcgtgaccgtgagcagctaa

SEQ ID NO: 1311 - DNA, 1890 bp, synthetic construct
  source 1..1890: mol_type = other DNA; note = FBXW7a-(GS)4-3DX.2 nucleic acid
aatcaggaactgctctctgtgggcagcaaaagacgacgaactggaggctctctgagaggtaacccttcctcaagccaggtagatgaagaacagatgaatcgtgtggtagaggaggaacagcaacagcaactcagacaacaagaggaggagcacactgcaaggaatggtgaagttgttggagtagaacctagacctggaggccaaaatgattcccagcaaggacagttggaagaaaacaataatagatttatttcggtagatgaggactcctcaggaaaccaagaagaacaagaggaagatgaagaacatgctggtgaacaagatgaggaggatgaggaggaggaggagatggaccaggagagtgacgattttgatcagtctgatgatagtagcagagaagatgaacatacacatactaacagtgtcacgaactccagtagtattgtggacctgcccgttcaccaactctcctccccattctatacaaaaacaacaaaaatgaaaagaaagttggaccatggttctgaggtccgctctttttctttgggaaagaaaccatgcaaagtctcagaatatacaagtaccactgggcttgtaccatgttcagcaacaccaacaacttttggggacctcagagcagccaatggccaagggcaacaacgacgccgaattacatctgtccagccacctacaggcctccaggaatggctaaaaatgtttcagagctggagtggaccagagaaattgcttgctttagatgaactcattgatagttgtgaaccaacacaagtaaaacatatgatgcaagtgatagaaccccagtttcaacgagacttcatttcattgctccctaaagagttggcactctatgtgctttcattcctggaacccaaagacctgctacaagcagctcagacatgtcgctactggagaattttggctgaagacaaccttctctggagagagaaatgcaaagaagaggggattgatgaaccattgcacatcaagagaagaaaagtaataaaaccaggtttcatacacagtccatggaaaagtgcatacatcagacagcacagaattgatactaactcgaggcgaggaggcagcggcagcggcagcggcagcgatattgtgctgacccagagcccggcgagcctggcggtgagcctgggccagcgcgcgaccattagctgccgcgcgagcgaaagcgtggataactatggctttagctttatgaactggtttcagcagaaaccgggccagccgccgaaactgctgatttatgcgaccagcaaccgcggcagcggcgtgccggcgcgctttagcggcagcggcagcggcaccgattttagcctgaacattcatccggtggaagaagatgatagcgcgatgtatttttgccagcagaccaaagaagtgccgtggacctttggcggcggcaccaaactggaaattaaacgcggcggcggcggcagcggcggcggcgatagcggcggcggcggcagcgaagtgaaactggtggaaagcggcggcgatctggtgaaaccgggcggcagcctgaaactgagctgcgcggcgagcggctttacctttagccattatggcatgagctgggtgcgccagaccccggataaacgcctggaatgggtggcgaccattggcagccgcggcacctatacccattatccggatagcgtgaaaggccgctttaccattagccgcgataacgataaaaacgcgctgtatctgcagatgaacagcctgcgcaccgaagataccgcgatgtattattgcgcgcgcaaaagcgaattttattattatggcaacacctattattatagcgcgatggattattggggccagggcgcgagcgtgaccgtgagcagctaa

SEQ ID NO: 1312 - DNA, 1896 bp, synthetic construct
  source 1..1896: mol_type = other DNA; note = FBXW7a-(GS)5-3DX.2 nucleic acid
aatcaggaactgctctctgtgggcagcaaaagacgacgaactggaggctctctgagaggtaacccttcctcaagccaggtagatgaagaacagatgaatcgtgtggtagaggaggaacagcaacagcaactcagacaacaagaggaggagcacactgcaaggaatggtgaagttgttggagtagaacctagacctggaggccaaaatgattcccagcaaggacagttggaagaaaacaataatagatttatttcggtagatgaggactcctcaggaaaccaagaagaacaagaggaagatgaagaacatgctggtgaacaagatgaggaggatgaggaggaggaggagatggaccaggagagtgacgattttgatcagtctgatgatagtagcagagaagatgaacatacacatactaacagtgtcacgaactccagtagtattgtggacctgcccgttcaccaactctcctccccattctatacaaaaacaacaaaaatgaaaagaaagttggaccatggttctgaggtccgctctttttctttgggaaagaaaccatgcaaagtctcagaatatacaagtaccactgggcttgtaccatgttcagcaacaccaacaacttttggggacctcagagcagccaatggccaagggcaacaacgacgccgaattacatctgtccagccacctacaggcctccaggaatggctaaaaatgtttcagagctggagtggaccagagaaattgcttgctttagatgaactcattgatagttgtgaaccaacacaagtaaaacatatgatgcaagtgatagaaccccagtttcaacgagacttcatttcattgctccctaaagagttggcactctatgtgctttcattcctggaacccaaagacctgctacaagcagctcagacatgtcgctactggagaattttggctgaagacaaccttctctggagagagaaatgcaaagaagaggggattgatgaaccattgcacatcaagagaagaaaagtaataaaaccaggtttcatacacagtccatggaaaagtgcatacatcagacagcacagaattgatactaactcgaggcgaggaggcagcggcagcggcagcggcagcggcagcgatattgtgctgacccagagcccggcgagcctggcggtgagcctgggccagcgcgcgaccattagctgccgcgcgagcgaaagcgtggataactatggctttagctttatgaactggtttcagcagaaaccgggccagccgccgaaactgctgatttatgcgaccagcaaccgcggcagcggcgtgccggcgcgctttagcggcagcggcagcggcaccgattttagcctgaacattcatccggtggaagaagatgatagcgcgatgtatttttgccagcagaccaaagaagtgccgtggacctttggcggcggcaccaaactggaaattaaacgcggcggcggcggcagcggcggcggcgatagcggcggcggcggcagcgaagtgaaactggtggaaagcggcggcgatctggtgaaaccgggcggcagcctgaaactgagctgcgcggcgagcggctttacctttagccattatggcatgagctgggtgcgccagaccccggataaacgcctggaatgggtggcgaccattggcagccgcggcacctatacccattatccggatagcgtgaaaggccgctttaccattagccgcgataacgataaaaacgcgctgtatctgcagatgaacagcctgcgcaccgaagataccgcgatgtattattgcgcgcgcaaaagcgaattttattattatggcaacacctattattatagcgcgatggattattggggccagggcgcgagcgtgaccgtgagcagctaa

SEQ ID NO: 1313 - DNA, 1902 bp, synthetic construct
  source 1..1902: mol_type = other DNA; note = FBXW7a-(GS)6-3DX.2 nucleic acid
aatcaggaactgctctctgtgggcagcaaaagacgacgaactggaggctctctgagaggtaacccttcctcaagccaggtagatgaagaacagatgaatcgtgtggtagaggaggaacagcaacagcaactcagacaacaagaggaggagcacactgcaaggaatggtgaagttgttggagtagaacctagacctggaggccaaaatgattcccagcaaggacagttggaagaaaacaataatagatttatttcggtagatgaggactcctcaggaaaccaagaagaacaagaggaagatgaagaacatgctggtgaacaagatgaggaggatgaggaggaggaggagatggaccaggagagtgacgattttgatcagtctgatgatagtagcagagaagatgaacatacacatactaacagtgtcacgaactccagtagtattgtggacctgcccgttcaccaactctcctccccattctatacaaaaacaacaaaaatgaaaagaaagttggaccatggttctgaggtccgctctttttctttgggaaagaaaccatgcaaagtctcagaatatacaagtaccactgggcttgtaccatgttcagcaacaccaacaacttttggggacctcagagcagccaatggccaagggcaacaacgacgccgaattacatctgtccagccacctacaggcctccaggaatggctaaaaatgtttcagagctggagtggaccagagaaattgcttgctttagatgaactcattgatagttgtgaaccaacacaagtaaaacatatgatgcaagtgatagaaccccagtttcaacgagacttcatttcattgctccctaaagagttggcactctatgtgctttcattcctggaacccaaagacctgctacaagcagctcagacatgtcgctactggagaattttggctgaagacaaccttctctggagagagaaatgcaaagaagaggggattgatgaaccattgcacatcaagagaagaaaagtaataaaaccaggtttcatacacagtccatggaaaagtgcatacatcagacagcacagaattgatactaactcgaggcgaggaggcagcggcagcggcagcggcagcggcagcggcagcgatattgtgctgacccagagcccggcgagcctggcggtgagcctgggccagcgcgcgaccattagctgccgcgcgagcgaaagcgtggataactatggctttagctttatgaactggtttcagcagaaaccgggccagccgccgaaactgctgatttatgcgaccagcaaccgcggcagcggcgtgccggcgcgctttagcggcagcggcagcggcaccgattttagcctgaacattcatccggtggaagaagatgatagcgcgatgtatttttgccagcagaccaaagaagtgccgtggacctttggcggcggcaccaaactggaaattaaacgcggcggcggcggcagcggcggcggcgatagcggcggcggcggcagcgaagtgaaactggtggaaagcggcggcgatctggtgaaaccgggcggcagcctgaaactgagctgcgcggcgagcggctttacctttagccattatggcatgagctgggtgcgccagaccccggataaacgcctggaatgggtggcgaccattggcagccgcggcacctatacccattatccggatagcgtgaaaggccgctttaccattagccgcgataacgataaaaacgcgctgtatctgcagatgaacagcctgcgcaccgaagataccgcgatgtattattgcgcgcgcaaaagcgaattttattattatggcaacacctattattatagcgcgatggattattggggccagggcgcgagcgtgaccgtgagcagctaa

SEQ ID NO: 1314 - DNA, 1902 bp, synthetic construct
  source 1..1902: mol_type = other DNA; note = HA-FBXW7a-(GS)1-3DX.2 nucleic acid
atgtacccatacgatgttccagattacgctaatcaggaactgctctctgtgggcagcaaaagacgacgaactggaggctctctgagaggtaacccttcctcaagccaggtagatgaagaacagatgaatcgtgtggtagaggaggaacagcaacagcaactcagacaacaagaggaggagcacactgcaaggaatggtgaagttgttggagtagaacctagacctggaggccaaaatgattcccagcaaggacagttggaagaaaacaataatagatttatttcggtagatgaggactcctcaggaaaccaagaagaacaagaggaagatgaagaacatgctggtgaacaagatgaggaggatgaggaggaggaggagatggaccaggagagtgacgattttgatcagtctgatgatagtagcagagaagatgaacatacacatactaacagtgtcacgaactccagtagtattgtggacctgcccgttcaccaactctcctccccattctatacaaaaacaacaaaaatgaaaagaaagttggaccatggttctgaggtccgctctttttctttgggaaagaaaccatgcaaagtctcagaatatacaagtaccactgggcttgtaccatgttcagcaacaccaacaacttttggggacctcagagcagccaatggccaagggcaacaacgacgccgaattacatctgtccagccacctacaggcctccaggaatggctaaaaatgtttcagagctggagtggaccagagaaattgcttgctttagatgaactcattgatagttgtgaaccaacacaagtaaaacatatgatgcaagtgatagaaccccagtttcaacgagacttcatttcattgctccctaaagagttggcactctatgtgctttcattcctggaacccaaagacctgctacaagcagctcagacatgtcgctactggagaattttggctgaagacaaccttctctggagagagaaatgcaaagaagaggggattgatgaaccattgcacatcaagagaagaaaagtaataaaaccaggtttcatacacagtccatggaaaagtgcatacatcagacagcacagaattgatactaactcgaggcgaggaggcagcgatattgtgctgacccagagcccggcgagcctggcggtgagcctgggccagcgcgcgaccattagctgccgcgcgagcgaaagcgtggataactatggctttagctttatgaactggtttcagcagaaaccgggccagccgccgaaactgctgatttatgcgaccagcaaccgcggcagcggcgtgccggcgcgctttagcggcagcggcagcggcaccgattttagcctgaacattcatccggtggaagaagatgatagcgcgatgtatttttgccagcagaccaaagaagtgccgtggacctttggcggcggcaccaaactggaaattaaacgcggcggcggcggcagcggcggcggcgatagcggcggcggcggcagcgaagtgaaactggtggaaagcggcggcgatctggtgaaaccgggcggcagcctgaaactgagctgcgcggcgagcggctttacctttagccattatggcatgagctgggtgcgccagaccccggataaacgcctggaatgggtggcgaccattggcagccgcggcacctatacccattatccggatagcgtgaaaggccgctttaccattagccgcgataacgataaaaacgcgctgtatctgcagatgaacagcctgcgcaccgaagataccgcgatgtattattgcgcgcgcaaaagcgaattttattattatggcaacacctattattatagcgcgatggattattggggccagggcgcgagcgtgaccgtgagcagctaa

SEQ ID NO: 1315 - DNA, 1908 bp, synthetic construct
  source 1..1908: mol_type = other DNA; note = HA-FBXW7a-(GS)2-3DX.2 nucleic acid
atgtacccatacgatgttccagattacgctaatcaggaactgctctctgtgggcagcaaaagacgacgaactggaggctctctgagaggtaacccttcctcaagccaggtagatgaagaacagatgaatcgtgtggtagaggaggaacagcaacagcaactcagacaacaagaggaggagcacactgcaaggaatggtgaagttgttggagtagaacctagacctggaggccaaaatgattcccagcaaggacagttggaagaaaacaataatagatttatttcggtagatgaggactcctcaggaaaccaagaagaacaagaggaagatgaagaacatgctggtgaacaagatgaggaggatgaggaggaggaggagatggaccaggagagtgacgattttgatcagtctgatgatagtagcagagaagatgaacatacacatactaacagtgtcacgaactccagtagtattgtggacctgcccgttcaccaactctcctccccattctatacaaaaacaacaaaaatgaaaagaaagttggaccatggttctgaggtccgctctttttctttgggaaagaaaccatgcaaagtctcagaatatacaagtaccactgggcttgtaccatgttcagcaacaccaacaacttttggggacctcagagcagccaatggccaagggcaacaacgacgccgaattacatctgtccagccacctacaggcctccaggaatggctaaaaatgtttcagagctggagtggaccagagaaattgcttgctttagatgaactcattgatagttgtgaaccaacacaagtaaaacatatgatgcaagtgatagaaccccagtttcaacgagacttcatttcattgctccctaaagagttggcactctatgtgctttcattcctggaacccaaagacctgctacaagcagctcagacatgtcgctactggagaattttggctgaagacaaccttctctggagagagaaatgcaaagaagaggggattgatgaaccattgcacatcaagagaagaaaagtaataaaaccaggtttcatacacagtccatggaaaagtgcatacatcagacagcacagaattgatactaactcgaggcgaggaggcagcggcagcgatattgtgctgacccagagcccggcgagcctggcggtgagcctgggccagcgcgcgaccattagctgccgcgcgagcgaaagcgtggataactatggctttagctttatgaactggtttcagcagaaaccgggccagccgccgaaactgctgatttatgcgaccagcaaccgcggcagcggcgtgccggcgcgctttagcggcagcggcagcggcaccgattttagcctgaacattcatccggtggaagaagatgatagcgcgatgtatttttgccagcagaccaaagaagtgccgtggacctttggcggcggcaccaaactggaaattaaacgcggcggcggcggcagcggcggcggcgatagcggcggcggcggcagcgaagtgaaactggtggaaagcggcggcgatctggtgaaaccgggcggcagcctgaaactgagctgcgcggcgagcggctttacctttagccattatggcatgagctgggtgcgccagaccccggataaacgcctggaatgggtggcgaccattggcagccgcggcacctatacccattatccggatagcgtgaaaggccgctttaccattagccgcgataacgataaaaacgcgctgtatctgcagatgaacagcctgcgcaccgaagataccgcgatgtattattgcgcgcgcaaaagcgaattttattattatggcaacacctattattatagcgcgatggattattggggccagggcgcgagcgtgaccgtgagcagctaa

SEQ ID NO: 1316 - DNA, 1914 bp, synthetic construct
  source 1..1914: mol_type = other DNA; note = HA-FBXW7a-(GS)3-3DX.2 nucleic acid
atgtacccatacgatgttccagattacgctaatcaggaactgctctctgtgggcagcaaaagacgacgaactggaggctctctgagaggtaacccttcctcaagccaggtagatgaagaacagatgaatcgtgtggtagaggaggaacagcaacagcaactcagacaacaagaggaggagcacactgcaaggaatggtgaagttgttggagtagaacctagacctggaggccaaaatgattcccagcaaggacagttggaagaaaacaataatagatttatttcggtagatgaggactcctcaggaaaccaagaagaacaagaggaagatgaagaacatgctggtgaacaagatgaggaggatgaggaggaggaggagatggaccaggagagtgacgattttgatcagtctgatgatagtagcagagaagatgaacatacacatactaacagtgtcacgaactccagtagtattgtggacctgcccgttcaccaactctcctccccattctatacaaaaacaacaaaaatgaaaagaaagttggaccatggttctgaggtccgctctttttctttgggaaagaaaccatgcaaagtctcagaatatacaagtaccactgggcttgtaccatgttcagcaacaccaacaacttttggggacctcagagcagccaatggccaagggcaacaacgacgccgaattacatctgtccagccacctacaggcctccaggaatggctaaaaatgtttcagagctggagtggaccagagaaattgcttgctttagatgaactcattgatagttgtgaaccaacacaagtaaaacatatgatgcaagtgatagaaccccagtttcaacgagacttcatttcattgctccctaaagagttggcactctatgtgctttcattcctggaacccaaagacctgctacaagcagctcagacatgtcgctactggagaattttggctgaagacaaccttctctggagagagaaatgcaaagaagaggggattgatgaaccattgcacatcaagagaagaaaagtaataaaaccaggtttcatacacagtccatggaaaagtgcatacatcagacagcacagaattgatactaactcgaggcgaggaggcagcggcagcggcagcgatattgtgctgacccagagcccggcgagcctggcggtgagcctgggccagcgcgcgaccattagctgccgcgcgagcgaaagcgtggataactatggctttagctttatgaactggtttcagcagaaaccgggccagccgccgaaactgctgatttatgcgaccagcaaccgcggcagcggcgtgccggcgcgctttagcggcagcggcagcggcaccgattttagcctgaacattcatccggtggaagaagatgatagcgcgatgtatttttgccagcagaccaaagaagtgccgtggacctttggcggcggcaccaaactggaaattaaacgcggcggcggcggcagcggcggcggcgatagcggcggcggcggcagcgaagtgaaactggtggaaagcggcggcgatctggtgaaaccgggcggcagcctgaaactgagctgcgcggcgagcggctttacctttagccattatggcatgagctgggtgcgccagaccccggataaacgcctggaatgggtggcgaccattggcagccgcggcacctatacccattatccggatagcgtgaaaggccgctttaccattagccgcgataacgataaaaacgcgctgtatctgcagatgaacagcctgcgcaccgaagataccgcgatgtattattgcgcgcgcaaaagcgaattttattattatggcaacacctattattatagcgcgatggattattggggccagggcgcgagcgtgaccgtgagcagctaa

SEQ ID NO: 1317 - DNA, 1920 bp, synthetic construct
  source 1..1920: mol_type = other DNA; note = HA-FBXW7a-(GS)4-3DX.2 nucleic acid
atgtacccatacgatgttccagattacgctaatcaggaactgctctctgtgggcagcaaaagacgacgaactggaggctctctgagaggtaacccttcctcaagccaggtagatgaagaacagatgaatcgtgtggtagaggaggaacagcaacagcaactcagacaacaagaggaggagcacactgcaaggaatggtgaagttgttggagtagaacctagacctggaggccaaaatgattcccagcaaggacagttggaagaaaacaataatagatttatttcggtagatgaggactcctcaggaaaccaagaagaacaagaggaagatgaagaacatgctggtgaacaagatgaggaggatgaggaggaggaggagatggaccaggagagtgacgattttgatcagtctgatgatagtagcagagaagatgaacatacacatactaacagtgtcacgaactccagtagtattgtggacctgcccgttcaccaactctcctccccattctatacaaaaacaacaaaaatgaaaagaaagttggaccatggttctgaggtccgctctttttctttgggaaagaaaccatgcaaagtctcagaatatacaagtaccactgggcttgtaccatgttcagcaacaccaacaacttttggggacctcagagcagccaatggccaagggcaacaacgacgccgaattacatctgtccagccacctacaggcctccaggaatggctaaaaatgtttcagagctggagtggaccagagaaattgcttgctttagatgaactcattgatagttgtgaaccaacacaagtaaaacatatgatgcaagtgatagaaccccagtttcaacgagacttcatttcattgctccctaaagagttggcactctatgtgctttcattcctggaacccaaagacctgctacaagcagctcagacatgtcgctactggagaattttggctgaagacaaccttctctggagagagaaatgcaaagaagaggggattgatgaaccattgcacatcaagagaagaaaagtaataaaaccaggtttcatacacagtccatggaaaagtgcatacatcagacagcacagaattgatactaactcgaggcgaggaggcagcggcagcggcagcggcagcgatattgtgctgacccagagcccggcgagcctggcggtgagcctgggccagcgcgcgaccattagctgccgcgcgagcgaaagcgtggataactatggctttagctttatgaactggtttcagcagaaaccgggccagccgccgaaactgctgatttatgcgaccagcaaccgcggcagcggcgtgccggcgcgctttagcggcagcggcagcggcaccgattttagcctgaacattcatccggtggaagaagatgatagcgcgatgtatttttgccagcagaccaaagaagtgccgtggacctttggcggcggcaccaaactggaaattaaacgcggcggcggcggcagcggcggcggcgatagcggcggcggcggcagcgaagtgaaactggtggaaagcggcggcgatctggtgaaaccgggcggcagcctgaaactgagctgcgcggcgagcggctttacctttagccattatggcatgagctgggtgcgccagaccccggataaacgcctggaatgggtggcgaccattggcagccgcggcacctatacccattatccggatagcgtgaaaggccgctttaccattagccgcgataacgataaaaacgcgctgtatctgcagatgaacagcctgcgcaccgaagataccgcgatgtattattgcgcgcgcaaaagcgaattttattattatggcaacacctattattatagcgcgatggattattggggccagggcgcgagcgtgaccgtgagcagctaa

SEQ ID NO: 1318 - DNA, 1926 bp, synthetic construct
  source 1..1926: mol_type = other DNA; note = HA-FBXW7a-(GS)5-3DX.2 nucleic acid
atgtacccatacgatgttccagattacgctaatcaggaactgctctctgtgggcagcaaaagacgacgaactggaggctctctgagaggtaacccttcctcaagccaggtagatgaagaacagatgaatcgtgtggtagaggaggaacagcaacagcaactcagacaacaagaggaggagcacactgcaaggaatggtgaagttgttggagtagaacctagacctggaggccaaaatgattcccagcaaggacagttggaagaaaacaataatagatttatttcggtagatgaggactcctcaggaaaccaagaagaacaagaggaagatgaagaacatgctggtgaacaagatgaggaggatgaggaggaggaggagatggaccaggagagtgacgattttgatcagtctgatgatagtagcagagaagatgaacatacacatactaacagtgtcacgaactccagtagtattgtggacctgcccgttcaccaactctcctccccattctatacaaaaacaacaaaaatgaaaagaaagttggaccatggttctgaggtccgctctttttctttgggaaagaaaccatgcaaagtctcagaatatacaagtaccactgggcttgtaccatgttcagcaacaccaacaacttttggggacctcagagcagccaatggccaagggcaacaacgacgccgaattacatctgtccagccacctacaggcctccaggaatggctaaaaatgtttcagagctggagtggaccagagaaattgcttgctttagatgaactcattgatagttgtgaaccaacacaagtaaaacatatgatgcaagtgatagaaccccagtttcaacgagacttcatttcattgctccctaaagagttggcactctatgtgctttcattcctggaacccaaagacctgctacaagcagctcagacatgtcgctactggagaattttggctgaagacaaccttctctggagagagaaatgcaaagaagaggggattgatgaaccattgcacatcaagagaagaaaagtaataaaaccaggtttcatacacagtccatggaaaagtgcatacatcagacagcacagaattgatactaactcgaggcgaggaggcagcggcagcggcagcggcagcggcagcgatattgtgctgacccagagcccggcgagcctggcggtgagcctgggccagcgcgcgaccattagctgccgcgcgagcgaaagcgtggataactatggctttagctttatgaactggtttcagcagaaaccgggccagccgccgaaactgctgatttatgcgaccagcaaccgcggcagcggcgtgccggcgcgctttagcggcagcggcagcggcaccgattttagcctgaacattcatccggtggaagaagatgatagcgcgatgtatttttgccagcagaccaaagaagtgccgtggacctttggcggcggcaccaaactggaaattaaacgcggcggcggcggcagcggcggcggcgatagcggcggcggcggcagcgaagtgaaactggtggaaagcggcggcgatctggtgaaaccgggcggcagcctgaaactgagctgcgcggcgagcggctttacctttagccattatggcatgagctgggtgcgccagaccccggataaacgcctggaatgggtggcgaccattggcagccgcggcacctatacccattatccggatagcgtgaaaggccgctttaccattagccgcgataacgataaaaacgcgctgtatctgcagatgaacagcctgcgcaccgaagataccgcgatgtattattgcgcgcgcaaaagcgaattttattattatggcaacacctattattatagcgcgatggattattggggccagggcgcgagcgtgaccgtgagcagctaa

SEQ ID NO: 1319 - DNA, 1932 bp, synthetic construct
  source 1..1932: mol_type = other DNA; note = HA-FBXW7a-(GS)6-3DX.2 nucleic acid
atgtacccatacgatgttccagattacgctaatcaggaactgctctctgtgggcagcaaaagacgacgaactggaggctctctgagaggtaacccttcctcaagccaggtagatgaagaacagatgaatcgtgtggtagaggaggaacagcaacagcaactcagacaacaagaggaggagcacactgcaaggaatggtgaagttgttggagtagaacctagacctggaggccaaaatgattcccagcaaggacagttggaagaaaacaataatagatttatttcggtagatgaggactcctcaggaaaccaagaagaacaagaggaagatgaagaacatgctggtgaacaagatgaggaggatgaggaggaggaggagatggaccaggagagtgacgattttgatcagtctgatgatagtagcagagaagatgaacatacacatactaacagtgtcacgaactccagtagtattgtggacctgcccgttcaccaactctcctccccattctatacaaaaacaacaaaaatgaaaagaaagttggaccatggttctgaggtccgctctttttctttgggaaagaaaccatgcaaagtctcagaatatacaagtaccactgggcttgtaccatgttcagcaacaccaacaacttttggggacctcagagcagccaatggccaagggcaacaacgacgccgaattacatctgtccagccacctacaggcctccaggaatggctaaaaatgtttcagagctggagtggaccagagaaattgcttgctttagatgaactcattgatagttgtgaaccaacacaagtaaaacatatgatgcaagtgatagaaccccagtttcaacgagacttcatttcattgctccctaaagagttggcactctatgtgctttcattcctggaacccaaagacctgctacaagcagctcagacatgtcgctactggagaattttggctgaagacaaccttctctggagagagaaatgcaaagaagaggggattgatgaaccattgcacatcaagagaagaaaagtaataaaaccaggtttcatacacagtccatggaaaagtgcatacatcagacagcacagaattgatactaactcgaggcgaggaggcagcggcagcggcagcggcagcggcagcggcagcgatattgtgctgacccagagcccggcgagcctggcggtgagcctgggccagcgcgcgaccattagctgccgcgcgagcgaaagcgtggataactatggctttagctttatgaactggtttcagcagaaaccgggccagccgccgaaactgctgatttatgcgaccagcaaccgcggcagcggcgtgccggcgcgctttagcggcagcggcagcggcaccgattttagcctgaacattcatccggtggaagaagatgatagcgcgatgtatttttgccagcagaccaaagaagtgccgtggacctttggcggcggcaccaaactggaaattaaacgcggcggcggcggcagcggcggcggcgatagcggcggcggcggcagcgaagtgaaactggtggaaagcggcggcgatctggtgaaaccgggcggcagcctgaaactgagctgcgcggcgagcggctttacctttagccattatggcatgagctgggtgcgccagaccccggataaacgcctggaatgggtggcgaccattggcagccgcggcacctatacccattatccggatagcgtgaaaggccgctttaccattagccgcgataacgataaaaacgcgctgtatctgcagatgaacagcctgcgcaccgaagataccgcgatgtattattgcgcgcgcaaaagcgaattttattattatggcaacacctattattatagcgcgatggattattggggccagggcgcgagcgtgaccgtgagcagctaa

SEQ ID NO: 1320 - DNA, 1779 bp, synthetic construct
  source 1..1779: mol_type = other DNA; note = NLS-Keap1-(GS)1-3DX.2 nucleic acid
ccggcggcgaaacgcgtgaaactggatggcagcggcagcggcagccagccagatcccaggcctagcggggctggggcctgctgccgattcctgcccctgcagtcacagtgccctgagggggcaggggacgcggtgatgtacgcctccactgagtgcaaggcggaggtgacgccctcccagcatggcaaccgcaccttcagctacaccctggaggatcataccaagcaggcctttggcatcatgaacgagctgcggctcagccagcagctgtgtgacgtcacactgcaggtcaagtaccaggatgcaccggccgcccagttcatggcccacaaggtggtgctggcctcatccagccctgtcttcaaggccatgttcaccaacgggctgcgggagcagggcatggaggtggtgtccattgagggtatccaccccaaggtcatggagcgcctcattgaattcgcctacacggcctccatctccatgggcgagaagtgtgtcctccacgtcatgaacggtgctgtcatgtaccagatcgacagcgttgtccgtgcctgcagtgacttcctggtgcagcagctggaccccagcaatgccatcggcatcgccaacttcgctgagcagattggctgtgtggagttgcaccagcgtgcccgggagtacatctacatgcattttggggaggtggccaagcaagaggagttcttcaacctgtcccactgccaactggtgaccctcatcagccgggacgacctgaacgtgcgctgcgagtccgaggtcttccacgcctgcatcaactgggtcaagtacgactgcgaacagcgacggttctacgtccaggcgctgctgcgggccgtgcgctgccactcgttgacgccgaacttcctgcagatgcagctgcagaagtgcgagatcctgcagtccgactcccgctgcaaggactacctggtcaagatcttcgaggagctcaccctgcacaagcccacgcaggtgatgccctgccgggcgcccggcagcgatattgtgctgacccagagcccggcgagcctggcggtgagcctgggccagcgcgcgaccattagctgccgcgcgagcgaaagcgtggataactatggctttagctttatgaactggtttcagcagaaaccgggccagccgccgaaactgctgatttatgcgaccagcaaccgcggcagcggcgtgccggcgcgctttagcggcagcggcagcggcaccgattttagcctgaacattcatccggtggaagaagatgatagcgcgatgtatttttgccagcagaccaaagaagtgccgtggacctttggcggcggcaccaaactggaaattaaacgcggcggcggcggcagcggcggcggcgatagcggcggcggcggcagcgaagtgaaactggtggaaagcggcggcgatctggtgaaaccgggcggcagcctgaaactgagctgcgcggcgagcggctttacctttagccattatggcatgagctgggtgcgccagaccccggataaacgcctggaatgggtggcgaccattggcagccgcggcacctatacccattatccggatagcgtgaaaggccgctttaccattagccgcgataacgataaaaacgcgctgtatctgcagatgaacagcctgcgcaccgaagataccgcgatgtattattgcgcgcgcaaaagcgaattttattattatggcaacacctattattatagcgcgatggattattggggccagggcgcgagcgtgaccgtgagcagctaa

SEQ ID NO: 1321 - DNA, 1785 bp, synthetic construct
  source 1..1785: mol_type = other DNA; note = NLS-Keap1-(GS)2-3DX.2 nucleic acid
ccggcggcgaaacgcgtgaaactggatggcagcggcagcggcagccagccagatcccaggcctagcggggctggggcctgctgccgattcctgcccctgcagtcacagtgccctgagggggcaggggacgcggtgatgtacgcctccactgagtgcaaggcggaggtgacgccctcccagcatggcaaccgcaccttcagctacaccctggaggatcataccaagcaggcctttggcatcatgaacgagctgcggctcagccagcagctgtgtgacgtcacactgcaggtcaagtaccaggatgcaccggccgcccagttcatggcccacaaggtggtgctggcctcatccagccctgtcttcaaggccatgttcaccaacgggctgcgggagcagggcatggaggtggtgtccattgagggtatccaccccaaggtcatggagcgcctcattgaattcgcctacacggcctccatctccatgggcgagaagtgtgtcctccacgtcatgaacggtgctgtcatgtaccagatcgacagcgttgtccgtgcctgcagtgacttcctggtgcagcagctggaccccagcaatgccatcggcatcgccaacttcgctgagcagattggctgtgtggagttgcaccagcgtgcccgggagtacatctacatgcattttggggaggtggccaagcaagaggagttcttcaacctgtcccactgccaactggtgaccctcatcagccgggacgacctgaacgtgcgctgcgagtccgaggtcttccacgcctgcatcaactgggtcaagtacgactgcgaacagcgacggttctacgtccaggcgctgctgcgggccgtgcgctgccactcgttgacgccgaacttcctgcagatgcagctgcagaagtgcgagatcctgcagtccgactcccgctgcaaggactacctggtcaagatcttcgaggagctcaccctgcacaagcccacgcaggtgatgccctgccgggcgcccggcagcggcagcgatattgtgctgacccagagcccggcgagcctggcggtgagcctgggccagcgcgcgaccattagctgccgcgcgagcgaaagcgtggataactatggctttagctttatgaactggtttcagcagaaaccgggccagccgccgaaactgctgatttatgcgaccagcaaccgcggcagcggcgtgccggcgcgctttagcggcagcggcagcggcaccgattttagcctgaacattcatccggtggaagaagatgatagcgcgatgtatttttgccagcagaccaaagaagtgccgtggacctttggcggcggcaccaaactggaaattaaacgcggcggcggcggcagcggcggcggcgatagcggcggcggcggcagcgaagtgaaactggtggaaagcggcggcgatctggtgaaaccgggcggcagcctgaaactgagctgcgcggcgagcggctttacctttagccattatggcatgagctgggtgcgccagaccccggataaacgcctggaatgggtggcgaccattggcagccgcggcacctatacccattatccggatagcgtgaaaggccgctttaccattagccgcgataacgataaaaacgcgctgtatctgcagatgaacagcctgcgcaccgaagataccgcgatgtattattgcgcgcgcaaaagcgaattttattattatggcaacacctattattatagcgcgatggattattggggccagggcgcgagcgtgaccgtgagcagctaa

SEQ ID NO: 1322 - DNA, 1791 bp, synthetic construct
  source 1..1791: mol_type = other DNA; note = NLS-Keap1-(GS)3-3DX.2 nucleic acid
ccggcggcgaaacgcgtgaaactggatggcagcggcagcggcagccagccagatcccaggcctagcggggctggggcctgctgccgattcctgcccctgcagtcacagtgccctgagggggcaggggacgcggtgatgtacgcctccactgagtgcaaggcggaggtgacgccctcccagcatggcaaccgcaccttcagctacaccctggaggatcataccaagcaggcctttggcatcatgaacgagctgcggctcagccagcagctgtgtgacgtcacactgcaggtcaagtaccaggatgcaccggccgcccagttcatggcccacaaggtggtgctggcctcatccagccctgtcttcaaggccatgttcaccaacgggctgcgggagcagggcatggaggtggtgtccattgagggtatccaccccaaggtcatggagcgcctcattgaattcgcctacacggcctccatctccatgggcgagaagtgtgtcctccacgtcatgaacggtgctgtcatgtaccagatcgacagcgttgtccgtgcctgcagtgacttcctggtgcagcagctggaccccagcaatgccatcggcatcgccaacttcgctgagcagattggctgtgtggagttgcaccagcgtgcccgggagtacatctacatgcattttggggaggtggccaagcaagaggagttcttcaacctgtcccactgccaactggtgaccctcatcagccgggacgacctgaacgtgcgctgcgagtccgaggtcttccacgcctgcatcaactgggtcaagtacgactgcgaacagcgacggttctacgtccaggcgctgctgcgggccgtgcgctgccactcgttgacgccgaacttcctgcagatgcagctgcagaagtgcgagatcctgcagtccgactcccgctgcaaggactacctggtcaagatcttcgaggagctcaccctgcacaagcccacgcaggtgatgccctgccgggcgcccggcagcggcagcggcagcgatattgtgctgacccagagcccggcgagcctggcggtgagcctgggccagcgcgcgaccattagctgccgcgcgagcgaaagcgtggataactatggctttagctttatgaactggtttcagcagaaaccgggccagccgccgaaactgctgatttatgcgaccagcaaccgcggcagcggcgtgccggcgcgctttagcggcagcggcagcggcaccgattttagcctgaacattcatccggtggaagaagatgatagcgcgatgtatttttgccagcagaccaaagaagtgccgtggacctttggcggcggcaccaaactggaaattaaacgcggcggcggcggcagcggcggcggcgatagcggcggcggcggcagcgaagtgaaactggtggaaagcggcggcgatctggtgaaaccgggcggcagcctgaaactgagctgcgcggcgagcggctttacctttagccattatggcatgagctgggtgcgccagaccccggataaacgcctggaatgggtggcgaccattggcagccgcggcacctatacccattatccggatagcgtgaaaggccgctttaccattagccgcgataacgataaaaacgcgctgtatctgcagatgaacagcctgcgcaccgaagataccgcgatgtattattgcgcgcgcaaaagcgaattttattattatggcaacacctattattatagcgcgatggattattggggccagggcgcgagcgtgaccgtgagcagctaa

SEQ ID NO: 1323 - DNA, 1797 bp, synthetic construct
  source 1..1797: mol_type = other DNA; note = NLS-Keap1-(GS)4-3DX.2 nucleic acid
ccggcggcgaaacgcgtgaaactggatggcagcggcagcggcagccagccagatcccaggcctagcggggctggggcctgctgccgattcctgcccctgcagtcacagtgccctgagggggcaggggacgcggtgatgtacgcctccactgagtgcaaggcggaggtgacgccctcccagcatggcaaccgcaccttcagctacaccctggaggatcataccaagcaggcctttggcatcatgaacgagctgcggctcagccagcagctgtgtgacgtcacactgcaggtcaagtaccaggatgcaccggccgcccagttcatggcccacaaggtggtgctggcctcatccagccctgtcttcaaggccatgttcaccaacgggctgcgggagcagggcatggaggtggtgtccattgagggtatccaccccaaggtcatggagcgcctcattgaattcgcctacacggcctccatctccatgggcgagaagtgtgtcctccacgtcatgaacggtgctgtcatgtaccagatcgacagcgttgtccgtgcctgcagtgacttcctggtgcagcagctggaccccagcaatgccatcggcatcgccaacttcgctgagcagattggctgtgtggagttgcaccagcgtgcccgggagtacatctacatgcattttggggaggtggccaagcaagaggagttcttcaacctgtcccactgccaactggtgaccctcatcagccgggacgacctgaacgtgcgctgcgagtccgaggtcttccacgcctgcatcaactgggtcaagtacgactgcgaacagcgacggttctacgtccaggcgctgctgcgggccgtgcgctgccactcgttgacgccgaacttcctgcagatgcagctgcagaagtgcgagatcctgcagtccgactcccgctgcaaggactacctggtcaagatcttcgaggagctcaccctgcacaagcccacgcaggtgatgccctgccgggcgcccggcagcggcagcggcagcggcagcgatattgtgctgacccagagcccggcgagcctggcggtgagcctgggccagcgcgcgaccattagctgccgcgcgagcgaaagcgtggataactatggctttagctttatgaactggtttcagcagaaaccgggccagccgccgaaactgctgatttatgcgaccagcaaccgcggcagcggcgtgccggcgcgctttagcggcagcggcagcggcaccgattttagcctgaacattcatccggtggaagaagatgatagcgcgatgtatttttgccagcagaccaaagaagtgccgtggacctttggcggcggcaccaaactggaaattaaacgcggcggcggcggcagcggcggcggcgatagcggcggcggcggcagcgaagtgaaactggtggaaagcggcggcgatctggtgaaaccgggcggcagcctgaaactgagctgcgcggcgagcggctttacctttagccattatggcatgagctgggtgcgccagaccccggataaacgcctggaatgggtggcgaccattggcagccgcggcacctatacccattatccggatagcgtgaaaggccgctttaccattagccgcgataacgataaaaacgcgctgtatctgcagatgaacagcctgcgcaccgaagataccgcgatgtattattgcgcgcgcaaaagcgaattttattattatggcaacacctattattatagcgcgatggattattggggccagggcgcgagcgtgaccgtgagcagctaa

SEQ ID NO: 1324 - DNA, 1803 bp, synthetic construct
  source 1..1803: mol_type = other DNA; note = NLS-Keap1-(GS)5-3DX.2 nucleic acid
ccggcggcgaaacgcgtgaaactggatggcagcggcagcggcagccagccagatcccaggcctagcggggctggggcctgctgccgattcctgcccctgcagtcacagtgccctgagggggcaggggacgcggtgatgtacgcctccactgagtgcaaggcggaggtgacgccctcccagcatggcaaccgcaccttcagctacaccctggaggatcataccaagcaggcctttggcatcatgaacgagctgcggctcagccagcagctgtgtgacgtcacactgcaggtcaagtaccaggatgcaccggccgcccagttcatggcccacaaggtggtgctggcctcatccagccctgtcttcaaggccatgttcaccaacgggctgcgggagcagggcatggaggtggtgtccattgagggtatccaccccaaggtcatggagcgcctcattgaattcgcctacacggcctccatctccatgggcgagaagtgtgtcctccacgtcatgaacggtgctgtcatgtaccagatcgacagcgttgtccgtgcctgcagtgacttcctggtgcagcagctggaccccagcaatgccatcggcatcgccaacttcgctgagcagattggctgtgtggagttgcaccagcgtgcccgggagtacatctacatgcattttggggaggtggccaagcaagaggagttcttcaacctgtcccactgccaactggtgaccctcatcagccgggacgacctgaacgtgcgctgcgagtccgaggtcttccacgcctgcatcaactgggtcaagtacgactgcgaacagcgacggttctacgtccaggcgctgctgcgggccgtgcgctgccactcgttgacgccgaacttcctgcagatgcagctgcagaagtgcgagatcctgcagtccgactcccgctgcaaggactacctggtcaagatcttcgaggagctcaccctgcacaagcccacgcaggtgatgccctgccgggcgcccggcagcggcagcggcagcggcagcggcagcgatattgtgctgacccagagcccggcgagcctggcggtgagcctgggccagcgcgcgaccattagctgccgcgcgagcgaaagcgtggataactatggctttagctttatgaactggtttcagcagaaaccgggccagccgccgaaactgctgatttatgcgaccagcaaccgcggcagcggcgtgccggcgcgctttagcggcagcggcagcggcaccgattttagcctgaacattcatccggtggaagaagatgatagcgcgatgtatttttgccagcagaccaaagaagtgccgtggacctttggcggcggcaccaaactggaaattaaacgcggcggcggcggcagcggcggcggcgatagcggcggcggcggcagcgaagtgaaactggtggaaagcggcggcgatctggtgaaaccgggcggcagcctgaaactgagctgcgcggcgagcggctttacctttagccattatggcatgagctgggtgcgccagaccccggataaacgcctggaatgggtggcgaccattggcagccgcggcacctatacccattatccggatagcgtgaaaggccgctttaccattagccgcgataacgataaaaacgcgctgtatctgcagatgaacagcctgcgcaccgaagataccgcgatgtattattgcgcgcgcaaaagcgaattttattattatggcaacacctattattatagcgcgatggattattggggccagggcgcgagcgtgaccgtgagcagctaa

SEQ ID NO: 1325 - DNA, 1809 bp, synthetic construct
  source 1..1809: mol_type = other DNA; note = NLS-Keap1-(GS)6-3DX.2 nucleic acid
ccggcggcgaaacgcgtgaaactggatggcagcggcagcggcagccagccagatcccaggcctagcggggctggggcctgctgccgattcctgcccctgcagtcacagtgccctgagggggcaggggacgcggtgatgtacgcctccactgagtgcaaggcggaggtgacgccctcccagcatggcaaccgcaccttcagctacaccctggaggatcataccaagcaggcctttggcatcatgaacgagctgcggctcagccagcagctgtgtgacgtcacactgcaggtcaagtaccaggatgcaccggccgcccagttcatggcccacaaggtggtgctggcctcatccagccctgtcttcaaggccatgttcaccaacgggctgcgggagcagggcatggaggtggtgtccattgagggtatccaccccaaggtcatggagcgcctcattgaattcgcctacacggcctccatctccatgggcgagaagtgtgtcctccacgtcatgaacggtgctgtcatgtaccagatcgacagcgttgtccgtgcctgcagtgacttcctggtgcagcagctggaccccagcaatgccatcggcatcgccaacttcgctgagcagattggctgtgtggagttgcaccagcgtgcccgggagtacatctacatgcattttggggaggtggccaagcaagaggagttcttcaacctgtcccactgccaactggtgaccctcatcagccgggacgacctgaacgtgcgctgcgagtccgaggtcttccacgcctgcatcaactgggtcaagtacgactgcgaacagcgacggttctacgtccaggcgctgctgcgggccgtgcgctgccactcgttgacgccgaacttcctgcagatgcagctgcagaagtgcgagatcctgcagtccgactcccgctgcaaggactacctggtcaagatcttcgaggagctcaccctgcacaagcccacgcaggtgatgccctgccgggcgcccggcagcggcagcggcagcggcagcggcagcggcagcgatattgtgctgacccagagcccggcgagcctggcggtgagcctgggccagcgcgcgaccattagctgccgcgcgagcgaaagcgtggataactatggctttagctttatgaactggtttcagcagaaaccgggccagccgccgaaactgctgatttatgcgaccagcaaccgcggcagcggcgtgccggcgcgctttagcggcagcggcagcggcaccgattttagcctgaacattcatccggtggaagaagatgatagcgcgatgtatttttgccagcagaccaaagaagtgccgtggacctttggcggcggcaccaaactggaaattaaacgcggcggcggcggcagcggcggcggcgatagcggcggcggcggcagcgaagtgaaactggtggaaagcggcggcgatctggtgaaaccgggcggcagcctgaaactgagctgcgcggcgagcggctttacctttagccattatggcatgagctgggtgcgccagaccccggataaacgcctggaatgggtggcgaccattggcagccgcggcacctatacccattatccggatagcgtgaaaggccgctttaccattagccgcgataacgataaaaacgcgctgtatctgcagatgaacagcctgcgcaccgaagataccgcgatgtattattgcgcgcgcaaaagcgaattttattattatggcaacacctattattatagcgcgatggattattggggccagggcgcgagcgtgaccgtgagcagctaa

SEQ ID NO: 1326 - DNA, 1809 bp, synthetic construct
  source 1..1809: mol_type = other DNA; note = HA-NLS-Keap1-(GS)1-3DX.2 nucleic acid
atgtacccatacgatgttccagattacgctccggcggcgaaacgcgtgaaactggatggcagcggcagcggcagccagccagatcccaggcctagcggggctggggcctgctgccgattcctgcccctgcagtcacagtgccctgagggggcaggggacgcggtgatgtacgcctccactgagtgcaaggcggaggtgacgccctcccagcatggcaaccgcaccttcagctacaccctggaggatcataccaagcaggcctttggcatcatgaacgagctgcggctcagccagcagctgtgtgacgtcacactgcaggtcaagtaccaggatgcaccggccgcccagttcatggcccacaaggtggtgctggcctcatccagccctgtcttcaaggccatgttcaccaacgggctgcgggagcagggcatggaggtggtgtccattgagggtatccaccccaaggtcatggagcgcctcattgaattcgcctacacggcctccatctccatgggcgagaagtgtgtcctccacgtcatgaacggtgctgtcatgtaccagatcgacagcgttgtccgtgcctgcagtgacttcctggtgcagcagctggaccccagcaatgccatcggcatcgccaacttcgctgagcagattggctgtgtggagttgcaccagcgtgcccgggagtacatctacatgcattttggggaggtggccaagcaagaggagttcttcaacctgtcccactgccaactggtgaccctcatcagccgggacgacctgaacgtgcgctgcgagtccgaggtcttccacgcctgcatcaactgggtcaagtacgactgcgaacagcgacggttctacgtccaggcgctgctgcgggccgtgcgctgccactcgttgacgccgaacttcctgcagatgcagctgcagaagtgcgagatcctgcagtccgactcccgctgcaaggactacctggtcaagatcttcgaggagctcaccctgcacaagcccacgcaggtgatgccctgccgggcgcccggcagcgatattgtgctgacccagagcccggcgagcctggcggtgagcctgggccagcgcgcgaccattagctgccgcgcgagcgaaagcgtggataactatggctttagctttatgaactggtttcagcagaaaccgggccagccgccgaaactgctgatttatgcgaccagcaaccgcggcagcggcgtgccggcgcgctttagcggcagcggcagcggcaccgattttagcctgaacattcatccggtggaagaagatgatagcgcgatgtatttttgccagcagaccaaagaagtgccgtggacctttggcggcggcaccaaactggaaattaaacgcggcggcggcggcagcggcggcggcgatagcggcggcggcggcagcgaagtgaaactggtggaaagcggcggcgatctggtgaaaccgggcggcagcctgaaactgagctgcgcggcgagcggctttacctttagccattatggcatgagctgggtgcgccagaccccggataaacgcctggaatgggtggcgaccattggcagccgcggcacctatacccattatccggatagcgtgaaaggccgctttaccattagccgcgataacgataaaaacgcgctgtatctgcagatgaacagcctgcgcaccgaagataccgcgatgtattattgcgcgcgcaaaagcgaattttattattatggcaacacctattattatagcgcgatggattattggggccagggcgcgagcgtgaccgtgagcagctaa

SEQ ID NO: 1327 - DNA, 1815 bp, synthetic construct
  source 1..1815: mol_type = other DNA; note = HA-NLS-Keap1-(GS)2-3DX.2 nucleic acid
atgtacccatacgatgttccagattacgctccggcggcgaaacgcgtgaaactggatggcagcggcagcggcagccagccagatcccaggcctagcggggctggggcctgctgccgattcctgcccctgcagtcacagtgccctgagggggcaggggacgcggtgatgtacgcctccactgagtgcaaggcggaggtgacgccctcccagcatggcaaccgcaccttcagctacaccctggaggatcataccaagcaggcctttggcatcatgaacgagctgcggctcagccagcagctgtgtgacgtcacactgcaggtcaagtaccaggatgcaccggccgcccagttcatggcccacaaggtggtgctggcctcatccagccctgtcttcaaggccatgttcaccaacgggctgcgggagcagggcatggaggtggtgtccattgagggtatccaccccaaggtcatggagcgcctcattgaattcgcctacacggcctccatctccatgggcgagaagtgtgtcctccacgtcatgaacggtgctgtcatgtaccagatcgacagcgttgtccgtgcctgcagtgacttcctggtgcagcagctggaccccagcaatgccatcggcatcgccaacttcgctgagcagattggctgtgtggagttgcaccagcgtgcccgggagtacatctacatgcattttggggaggtggccaagcaagaggagttcttcaacctgtcccactgccaactggtgaccctcatcagccgggacgacctgaacgtgcgctgcgagtccgaggtcttccacgcctgcatcaactgggtcaagtacgactgcgaacagcgacggttctacgtccaggcgctgctgcgggccgtgcgctgccactcgttgacgccgaacttcctgcagatgcagctgcagaagtgcgagatcctgcagtccgactcccgctgcaaggactacctggtcaagatcttcgaggagctcaccctgcacaagcccacgcaggtgatgccctgccgggcgcccggcagcggcagcgatattgtgctgacccagagcccggcgagcctggcggtgagcctgggccagcgcgcgaccattagctgccgcgcgagcgaaagcgtggataactatggctttagctttatgaactggtttcagcagaaaccgggccagccgccgaaactgctgatttatgcgaccagcaaccgcggcagcggcgtgccggcgcgctttagcggcagcggcagcggcaccgattttagcctgaacattcatccggtggaagaagatgatagcgcgatgtatttttgccagcagaccaaagaagtgccgtggacctttggcggcggcaccaaactggaaattaaacgcggcggcggcggcagcggcggcggcgatagcggcggcggcggcagcgaagtgaaactggtggaaagcggcggcgatctggtgaaaccgggcggcagcctgaaactgagctgcgcggcgagcggctttacctttagccattatggcatgagctgggtgcgccagaccccggataaacgcctggaatgggtggcgaccattggcagccgcggcacctatacccattatccggatagcgtgaaaggccgctttaccattagccgcgataacgataaaaacgcgctgtatctgcagatgaacagcctgcgcaccgaagataccgcgatgtattattgcgcgcgcaaaagcgaattttattattatggcaacacctattattatagcgcgatggattattggggccagggcgcgagcgtgaccgtgagcagctaa

SEQ ID NO: 1328 - DNA, 1821 bp, synthetic construct
  source 1..1821: mol_type = other DNA; note = HA-NLS-Keap1-(GS)3-3DX.2 nucleic acid
atgtacccatacgatgttccagattacgctccggcggcgaaacgcgtgaaactggatggcagcggcagcggcagccagccagatcccaggcctagcggggctggggcctgctgccgattcctgcccctgcagtcacagtgccctgagggggcaggggacgcggtgatgtacgcctccactgagtgcaaggcggaggtgacgccctcccagcatggcaaccgcaccttcagctacaccctggaggatcataccaagcaggcctttggcatcatgaacgagctgcggctcagccagcagctgtgtgacgtcacactgcaggtcaagtaccaggatgcaccggccgcccagttcatggcccacaaggtggtgctggcctcatccagccctgtcttcaaggccatgttcaccaacgggctgcgggagcagggcatggaggtggtgtccattgagggtatccaccccaaggtcatggagcgcctcattgaattcgcctacacggcctccatctccatgggcgagaagtgtgtcctccacgtcatgaacggtgctgtcatgtaccagatcgacagcgttgtccgtgcctgcagtgacttcctggtgcagcagctggaccccagcaatgccatcggcatcgccaacttcgctgagcagattggctgtgtggagttgcaccagcgtgcccgggagtacatctacatgcattttggggaggtggccaagcaagaggagttcttcaacctgtcccactgccaactggtgaccctcatcagccgggacgacctgaacgtgcgctgcgagtccgaggtcttccacgcctgcatcaactgggtcaagtacgactgcgaacagcgacggttctacgtccaggcgctgctgcgggccgtgcgctgccactcgttgacgccgaacttcctgcagatgcagctgcagaagtgcgagatcctgcagtccgactcccgctgcaaggactacctggtcaagatcttcgaggagctcaccctgcacaagcccacgcaggtgatgccctgccgggcgcccggcagcggcagcggcagcgatattgtgctgacccagagcccggcgagcctggcggtgagcctgggccagcgcgcgaccattagctgccgcgcgagcgaaagcgtggataactatggctttagctttatgaactggtttcagcagaaaccgggccagccgccgaaactgctgatttatgcgaccagcaaccgcggcagcggcgtgccggcgcgctttagcggcagcggcagcggcaccgattttagcctgaacattcatccggtggaagaagatgatagcgcgatgtatttttgccagcagaccaaagaagtgccgtggacctttggcggcggcaccaaactggaaattaaacgcggcggcggcggcagcggcggcggcgatagcggcggcggcggcagcgaagtgaaactggtggaaagcggcggcgatctggtgaaaccgggcggcagcctgaaactgagctgcgcggcgagcggctttacctttagccattatggcatgagctgggtgcgccagaccccggataaacgcctggaatgggtggcgaccattggcagccgcggcacctatacccattatccggatagcgtgaaaggccgctttaccattagccgcgataacgataaaaacgcgctgtatctgcagatgaacagcctgcgcaccgaagataccgcgatgtattattgcgcgcgcaaaagcgaattttattattatggcaacacctattattatagcgcgatggattattggggccagggcgcgagcgtgaccgtgagcagctaa

SEQ ID NO: 1329 - DNA, 1827 bp, synthetic construct
  source 1..1827: mol_type = other DNA; note = HA-NLS-Keap1-(GS)4-3DX.2 nucleic acid
atgtacccatacgatgttccagattacgctccggcggcgaaacgcgtgaaactggatggcagcggcagcggcagccagccagatcccaggcctagcggggctggggcctgctgccgattcctgcccctgcagtcacagtgccctgagggggcaggggacgcggtgatgtacgcctccactgagtgcaaggcggaggtgacgccctcccagcatggcaaccgcaccttcagctacaccctggaggatcataccaagcaggcctttggcatcatgaacgagctgcggctcagccagcagctgtgtgacgtcacactgcaggtcaagtaccaggatgcaccggccgcccagttcatggcccacaaggtggtgctggcctcatccagccctgtcttcaaggccatgttcaccaacgggctgcgggagcagggcatggaggtggtgtccattgagggtatccaccccaaggtcatggagcgcctcattgaattcgcctacacggcctccatctccatgggcgagaagtgtgtcctccacgtcatgaacggtgctgtcatgtaccagatcgacagcgttgtccgtgcctgcagtgacttcctggtgcagcagctggaccccagcaatgccatcggcatcgccaacttcgctgagcagattggctgtgtggagttgcaccagcgtgcccgggagtacatctacatgcattttggggaggtggccaagcaagaggagttcttcaacctgtcccactgccaactggtgaccctcatcagccgggacgacctgaacgtgcgctgcgagtccgaggtcttccacgcctgcatcaactgggtcaagtacgactgcgaacagcgacggttctacgtccaggcgctgctgcgggccgtgcgctgccactcgttgacgccgaacttcctgcagatgcagctgcagaagtgcgagatcctgcagtccgactcccgctgcaaggactacctggtcaagatcttcgaggagctcaccctgcacaagcccacgcaggtgatgccctgccgggcgcccggcagcggcagcggcagcggcagcgatattgtgctgacccagagcccggcgagcctggcggtgagcctgggccagcgcgcgaccattagctgccgcgcgagcgaaagcgtggataactatggctttagctttatgaactggtttcagcagaaaccgggccagccgccgaaactgctgatttatgcgaccagcaaccgcggcagcggcgtgccggcgcgctttagcggcagcggcagcggcaccgattttagcctgaacattcatccggtggaagaagatgatagcgcgatgtatttttgccagcagaccaaagaagtgccgtggacctttggcggcggcaccaaactggaaattaaacgcggcggcggcggcagcggcggcggcgatagcggcggcggcggcagcgaagtgaaactggtggaaagcggcggcgatctggtgaaaccgggcggcagcctgaaactgagctgcgcggcgagcggctttacctttagccattatggcatgagctgggtgcgccagaccccggataaacgcctggaatgggtggcgaccattggcagccgcggcacctatacccattatccggatagcgtgaaaggccgctttaccattagccgcgataacgataaaaacgcgctgtatctgcagatgaacagcctgcgcaccgaagataccgcgatgtattattgcgcgcgcaaaagcgaattttattattatggcaacacctattattatagcgcgatggattattggggccagggcgcgagcgtgaccgtgagcagctaa

SEQ ID NO: 1330 - DNA, 1833 bp, synthetic construct
  source 1..1833: mol_type = other DNA; note = HA-NLS-Keap1-(GS)5-3DX.2 nucleic acid
atgtacccatacgatgttccagattacgctccggcggcgaaacgcgtgaaactggatggcagcggcagcggcagccagccagatcccaggcctagcggggctggggcctgctgccgattcctgcccctgcagtcacagtgccctgagggggcaggggacgcggtgatgtacgcctccactgagtgcaaggcggaggtgacgccctcccagcatggcaaccgcaccttcagctacaccctggaggatcataccaagcaggcctttggcatcatgaacgagctgcggctcagccagcagctgtgtgacgtcacactgcaggtcaagtaccaggatgcaccggccgcccagttcatggcccacaaggtggtgctggcctcatccagccctgtcttcaaggccatgttcaccaacgggctgcgggagcagggcatggaggtggtgtccattgagggtatccaccccaaggtcatggagcgcctcattgaattcgcctacacggcctccatctccatgggcgagaagtgtgtcctccacgtcatgaacggtgctgtcatgtaccagatcgacagcgttgtccgtgcctgcagtgacttcctggtgcagcagctggaccccagcaatgccatcggcatcgccaacttcgctgagcagattggctgtgtggagttgcaccagcgtgcccgggagtacatctacatgcattttggggaggtggccaagcaagaggagttcttcaacctgtcccactgccaactggtgaccctcatcagccgggacgacctgaacgtgcgctgcgagtccgaggtcttccacgcctgcatcaactgggtcaagtacgactgcgaacagcgacggttctacgtccaggcgctgctgcgggccgtgcgctgccactcgttgacgccgaacttcctgcagatgcagctgcagaagtgcgagatcctgcagtccgactcccgctgcaaggactacctggtcaagatcttcgaggagctcaccctgcacaagcccacgcaggtgatgccctgccgggcgcccggcagcggcagcggcagcggcagcggcagcgatattgtgctgacccagagcccggcgagcctggcggtgagcctgggccagcgcgcgaccattagctgccgcgcgagcgaaagcgtggataactatggctttagctttatgaactggtttcagcagaaaccgggccagccgccgaaactgctgatttatgcgaccagcaaccgcggcagcggcgtgccggcgcgctttagcggcagcggcagcggcaccgattttagcctgaacattcatccggtggaagaagatgatagcgcgatgtatttttgccagcagaccaaagaagtgccgtggacctttggcggcggcaccaaactggaaattaaacgcggcggcggcggcagcggcggcggcgatagcggcggcggcggcagcgaagtgaaactggtggaaagcggcggcgatctggtgaaaccgggcggcagcctgaaactgagctgcgcggcgagcggctttacctttagccattatggcatgagctgggtgcgccagaccccggataaacgcctggaatgggtggcgaccattggcagccgcggcacctatacccattatccggatagcgtgaaaggccgctttaccattagccgcgataacgataaaaacgcgctgtatctgcagatgaacagcctgcgcaccgaagataccgcgatgtattattgcgcgcgcaaaagcgaattttattattatggcaacacctattattatagcgcgatggattattggggccagggcgcgagcgtgaccgtgagcagctaa

SEQ ID NO: 1331 - DNA, 1839 bp, synthetic construct
  source 1..1839: mol_type = other DNA; note = HA-NLS-Keap1-(GS)6-3DX.2 nucleic acid
atgtacccatacgatgttccagattacgctccggcggcgaaacgcgtgaaactggatggcagcggcagcggcagccagccagatcccaggcctagcggggctggggcctgctgccgattcctgcccctgcagtcacagtgccctgagggggcaggggacgcggtgatgtacgcctccactgagtgcaaggcggaggtgacgccctcccagcatggcaaccgcaccttcagctacaccctggaggatcataccaagcaggcctttggcatcatgaacgagctgcggctcagccagcagctgtgtgacgtcacactgcaggtcaagtaccaggatgcaccggccgcccagttcatggcccacaaggtggtgctggcctcatccagccctgtcttcaaggccatgttcaccaacgggctgcgggagcagggcatggaggtggtgtccattgagggtatccaccccaaggtcatggagcgcctcattgaattcgcctacacggcctccatctccatgggcgagaagtgtgtcctccacgtcatgaacggtgctgtcatgtaccagatcgacagcgttgtccgtgcctgcagtgacttcctggtgcagcagctggaccccagcaatgccatcggcatcgccaacttcgctgagcagattggctgtgtggagttgcaccagcgtgcccgggagtacatctacatgcattttggggaggtggccaagcaagaggagttcttcaacctgtcccactgccaactggtgaccctcatcagccgggacgacctgaacgtgcgctgcgagtccgaggtcttccacgcctgcatcaactgggtcaagtacgactgcgaacagcgacggttctacgtccaggcgctgctgcgggccgtgcgctgccactcgttgacgccgaacttcctgcagatgcagctgcagaagtgcgagatcctgcagtccgactcccgctgcaaggactacctggtcaagatcttcgaggagctcaccctgcacaagcccacgcaggtgatgccctgccgggcgcccggcagcggcagcggcagcggcagcggcagcggcagcgatattgtgctgacccagagcccggcgagcctggcggtgagcctgggccagcgcgcgaccattagctgccgcgcgagcgaaagcgtggataactatggctttagctttatgaactggtttcagcagaaaccgggccagccgccgaaactgctgatttatgcgaccagcaaccgcggcagcggcgtgccggcgcgctttagcggcagcggcagcggcaccgattttagcctgaacattcatccggtggaagaagatgatagcgcgatgtatttttgccagcagaccaaagaagtgccgtggacctttggcggcggcaccaaactggaaattaaacgcggcggcggcggcagcggcggcggcgatagcggcggcggcggcagcgaagtgaaactggtggaaagcggcggcgatctggtgaaaccgggcggcagcctgaaactgagctgcgcggcgagcggctttacctttagccattatggcatgagctgggtgcgccagaccccggataaacgcctggaatgggtggcgaccattggcagccgcggcacctatacccattatccggatagcgtgaaaggccgctttaccattagccgcgataacgataaaaacgcgctgtatctgcagatgaacagcctgcgcaccgaagataccgcgatgtattattgcgcgcgcaaaagcgaattttattattatggcaacacctattattatagcgcgatggattattggggccagggcgcgagcgtgaccgtgagcagctaa

SEQ ID NO: 1332 - DNA, 1197 bp, synthetic construct
  source 1..1197: mol_type = other DNA; note = NLS-RNF125-(GS)1-3DX.2 nucleic acid
ccggcggcgaaacgcgtgaaactggatggcagcggcagcggcagcggctccgtgctgagcaccgacagcggcaaatcggcgcccgcctctgccaccgcgcgggccctggagcgcaggagggacccggagttgcccgtcacgtccttcgactgcgccgtgtgccttgaggtgttacaccagcctgtccggacccgctgcggccacgtattctgccgttcctgtattgctaccagtctgaagaacaacaagtggacctgtccttattgccgggcatatcttccttcagaaggagttccagcaactgatgtagccaaaagaatgaaatcagagtataagaactgcgctgagtgtgacaccctggtttgcctcagtgaaatgagggcacatattcggacttgtcagaagtacatagataagtatggaccaggcagcgatattgtgctgacccagagcccggcgagcctggcggtgagcctgggccagcgcgcgaccattagctgccgcgcgagcgaaagcgtggataactatggctttagctttatgaactggtttcagcagaaaccgggccagccgccgaaactgctgatttatgcgaccagcaaccgcggcagcggcgtgccggcgcgctttagcggcagcggcagcggcaccgattttagcctgaacattcatccggtggaagaagatgatagcgcgatgtatttttgccagcagaccaaagaagtgccgtggacctttggcggcggcaccaaactggaaattaaacgcggcggcggcggcagcggcggcggcgatagcggcggcggcggcagcgaagtgaaactggtggaaagcggcggcgatctggtgaaaccgggcggcagcctgaaactgagctgcgcggcgagcggctttacctttagccattatggcatgagctgggtgcgccagaccccggataaacgcctggaatgggtggcgaccattggcagccgcggcacctatacccattatccggatagcgtgaaaggccgctttaccattagccgcgataacgataaaaacgcgctgtatctgcagatgaacagcctgcgcaccgaagataccgcgatgtattattgcgcgcgcaaaagcgaattttattattatggcaacacctattattatagcgcgatggattattggggccagggcgcgagcgtgaccgtgagcagctaa

SEQ ID NO: 1333 - DNA, 1203 bp, synthetic construct
  source 1..1203: mol_type = other DNA; note = NLS-RNF125-(GS)2-3DX.2 nucleic acid
ccggcggcgaaacgcgtgaaactggatggcagcggcagcggcagcggctccgtgctgagcaccgacagcggcaaatcggcgcccgcctctgccaccgcgcgggccctggagcgcaggagggacccggagttgcccgtcacgtccttcgactgcgccgtgtgccttgaggtgttacaccagcctgtccggacccgctgcggccacgtattctgccgttcctgtattgctaccagtctgaagaacaacaagtggacctgtccttattgccgggcatatcttccttcagaaggagttccagcaactgatgtagccaaaagaatgaaatcagagtataagaactgcgctgagtgtgacaccctggtttgcctcagtgaaatgagggcacatattcggacttgtcagaagtacatagataagtatggaccaggcagcggcagcgatattgtgctgacccagagcccggcgagcctggcggtgagcctgggccagcgcgcgaccattagctgccgcgcgagcgaaagcgtggataactatggctttagctttatgaactggtttcagcagaaaccgggccagccgccgaaactgctgatttatgcgaccagcaaccgcggcagcggcgtgccggcgcgctttagcggcagcggcagcggcaccgattttagcctgaacattcatccggtggaagaagatgatagcgcgatgtatttttgccagcagaccaaagaagtgccgtggacctttggcggcggcaccaaactggaaattaaacgcggcggcggcggcagcggcggcggcgatagcggcggcggcggcagcgaagtgaaactggtggaaagcggcggcgatctggtgaaaccgggcggcagcctgaaactgagctgcgcggcgagcggctttacctttagccattatggcatgagctgggtgcgccagaccccggataaacgcctggaatgggtggcgaccattggcagccgcggcacctatacccattatccggatagcgtgaaaggccgctttaccattagccgcgataacgataaaaacgcgctgtatctgcagatgaacagcctgcgcaccgaagataccgcgatgtattattgcgcgcgcaaaagcgaattttattattatggcaacacctattattatagcgcgatggattattggggccagggcgcgagcgtgaccgtgagcagctaa

SEQ ID NO: 1334 - DNA, 1209 bp, synthetic construct
  source 1..1209: mol_type = other DNA; note = NLS-RNF125-(GS)3-3DX.2 nucleic acid
ccggcggcgaaacgcgtgaaactggatggcagcggcagcggcagcggctccgtgctgagcaccgacagcggcaaatcggcgcccgcctctgccaccgcgcgggccctggagcgcaggagggacccggagttgcccgtcacgtccttcgactgcgccgtgtgccttgaggtgttacaccagcctgtccggacccgctgcggccacgtattctgccgttcctgtattgctaccagtctgaagaacaacaagtggacctgtccttattgccgggcatatcttccttcagaaggagttccagcaactgatgtagccaaaagaatgaaatcagagtataagaactgcgctgagtgtgacaccctggtttgcctcagtgaaatgagggcacatattcggacttgtcagaagtacatagataagtatggaccaggcagcggcagcggcagcgatattgtgctgacccagagcccggcgagcctggcggtgagcctgggccagcgcgcgaccattagctgccgcgcgagcgaaagcgtggataactatggctttagctttatgaactggtttcagcagaaaccgggccagccgccgaaactgctgatttatgcgaccagcaaccgcggcagcggcgtgccggcgcgctttagcggcagcggcagcggcaccgattttagcctgaacattcatccggtggaagaagatgatagcgcgatgtatttttgccagcagaccaaagaagtgccgtggacctttggcggcggcaccaaactggaaattaaacgcggcggcggcggcagcggcggcggcgatagcggcggcggcggcagcgaagtgaaactggtggaaagcggcggcgatctggtgaaaccgggcggcagcctgaaactgagctgcgcggcgagcggctttacctttagccattatggcatgagctgggtgcgccagaccccggataaacgcctggaatgggtggcgaccattggcagccgcggcacctatacccattatccggatagcgtgaaaggccgctttaccattagccgcgataacgataaaaacgcgctgtatctgcagatgaacagcctgcgcaccgaagataccgcgatgtattattgcgcgcgcaaaagcgaattttattattatggcaacacctattattatagcgcgatggattattggggccagggcgcgagcgtgaccgtgagcagctaa

SEQ ID NO: 1335 - DNA, 1215 bp, synthetic construct
  source 1..1215: mol_type = other DNA; note = NLS-RNF125-(GS)4-3DX.2 nucleic acid
ccggcggcgaaacgcgtgaaactggatggcagcggcagcggcagcggctccgtgctgagcaccgacagcggcaaatcggcgcccgcctctgccaccgcgcgggccctggagcgcaggagggacccggagttgcccgtcacgtccttcgactgcgccgtgtgccttgaggtgttacaccagcctgtccggacccgctgcggccacgtattctgccgttcctgtattgctaccagtctgaagaacaacaagtggacctgtccttattgccgggcatatcttccttcagaaggagttccagcaactgatgtagccaaaagaatgaaatcagagtataagaactgcgctgagtgtgacaccctggtttgcctcagtgaaatgagggcacatattcggacttgtcagaagtacatagataagtatggaccaggcagcggcagcggcagcggcagcgatattgtgctgacccagagcccggcgagcctggcggtgagcctgggccagcgcgcgaccattagctgccgcgcgagcgaaagcgtggataactatggctttagctttatgaactggtttcagcagaaaccgggccagccgccgaaactgctgatttatgcgaccagcaaccgcggcagcggcgtgccggcgcgctttagcggcagcggcagcggcaccgattttagcctgaacattcatccggtggaagaagatgatagcgcgatgtatttttgccagcagaccaaagaagtgccgtggacctttggcggcggcaccaaactggaaattaaacgcggcggcggcggcagcggcggcggcgatagcggcggcggcggcagcgaagtgaaactggtggaaagcggcggcgatctggtgaaaccgggcggcagcctgaaactgagctgcgcggcgagcggctttacctttagccattatggcatgagctgggtgcgccagaccccggataaacgcctggaatgggtggcgaccattggcagccgcggcacctatacccattatccggatagcgtgaaaggccgctttaccattagccgcgataacgataaaaacgcgctgtatctgcagatgaacagcctgcgcaccgaagataccgcgatgtattattgcgcgcgcaaaagcgaattttattattatggcaacacctattattatagcgcgatggattattggggccagggcgcgagcgtgaccgtgagcagctaa

SEQ ID NO: 1336 - DNA, 1221 bp, synthetic construct
  source 1..1221: mol_type = other DNA; note = NLS-RNF125-(GS)5-3DX.2 nucleic acid
ccggcggcgaaacgcgtgaaactggatggcagcggcagcggcagcggctccgtgctgagcaccgacagcggcaaatcggcgcccgcctctgccaccgcgcgggccctggagcgcaggagggacccggagttgcccgtcacgtccttcgactgcgccgtgtgccttgaggtgttacaccagcctgtccggacccgctgcggccacgtattctgccgttcctgtattgctaccagtctgaagaacaacaagtggacctgtccttattgccgggcatatcttccttcagaaggagttccagcaactgatgtagccaaaagaatgaaatcagagtataagaactgcgctgagtgtgacaccctggtttgcctcagtgaaatgagggcacatattcggacttgtcagaagtacatagataagtatggaccaggcagcggcagcggcagcggcagcggcagcgatattgtgctgacccagagcccggcgagcctggcggtgagcctgggccagcgcgcgaccattagctgccgcgcgagcgaaagcgtggataactatggctttagctttatgaactggtttcagcagaaaccgggccagccgccgaaactgctgatttatgcgaccagcaaccgcggcagcggcgtgccggcgcgctttagcggcagcggcagcggcaccgattttagcctgaacattcatccggtggaagaagatgatagcgcgatgtatttttgccagcagaccaaagaagtgccgtggacctttggcggcggcaccaaactggaaattaaacgcggcggcggcggcagcggcggcggcgatagcggcggcggcggcagcgaagtgaaactggtggaaagcggcggcgatctggtgaaaccgggcggcagcctgaaactgagctgcgcggcgagcggctttacctttagccattatggcatgagctgggtgcgccagaccccggataaacgcctggaatgggtggcgaccattggcagccgcggcacctatacccattatccggatagcgtgaaaggccgctttaccattagccgcgataacgataaaaacgcgctgtatctgcagatgaacagcctgcgcaccgaagataccgcgatgtattattgcgcgcgcaaaagcgaattttattattatggcaacacctattattatagcgcgatggattattggggccagggcgcgagcgtgaccgtgagcagctaa

SEQ ID NO: 1337 - DNA, 1227 bp, synthetic construct
  source 1..1227: mol_type = other DNA; note = NLS-RNF125-(GS)6-3DX.2 nucleic acid
ccggcggcgaaacgcgtgaaactggatggcagcggcagcggcagcggctccgtgctgagcaccgacagcggcaaatcggcgcccgcctctgccaccgcgcgggccctggagcgcaggagggacccggagttgcccgtcacgtccttcgactgcgccgtgtgccttgaggtgttacaccagcctgtccggacccgctgcggccacgtattctgccgttcctgtattgctaccagtctgaagaacaacaagtggacctgtccttattgccgggcatatcttccttcagaaggagttccagcaactgatgtagccaaaagaatgaaatcagagtataagaactgcgctgagtgtgacaccctggtttgcctcagtgaaatgagggcacatattcggacttgtcagaagtacatagataagtatggaccaggcagcggcagcggcagcggcagcggcagcggcagcgatattgtgctgacccagagcccggcgagcctggcggtgagcctgggccagcgcgcgaccattagctgccgcgcgagcgaaagcgtggataactatggctttagctttatgaactggtttcagcagaaaccgggccagccgccgaaactgctgatttatgcgaccagcaaccgcggcagcggcgtgccggcgcgctttagcggcagcggcagcggcaccgattttagcctgaacattcatccggtggaagaagatgatagcgcgatgtatttttgccagcagaccaaagaagtgccgtggacctttggcggcggcaccaaactggaaattaaacgcggcggcggcggcagcggcggcggcgatagcggcggcggcggcagcgaagtgaaactggtggaaagcggcggcgatctggtgaaaccgggcggcagcctgaaactgagctgcgcggcgagcggctttacctttagccattatggcatgagctgggtgcgccagaccccggataaacgcctggaatgggtggcgaccattggcagccgcggcacctatacccattatccggatagcgtgaaaggccgctttaccattagccgcgataacgataaaaacgcgctgtatctgcagatgaacagcctgcgcaccgaagataccgcgatgtattattgcgcgcgcaaaagcgaattttattattatggcaacacctattattatagcgcgatggattattggggccagggcgcgagcgtgaccgtgagcagctaa

SEQ ID NO: 1338 - DNA, 1227 bp, synthetic construct
  source 1..1227: mol_type = other DNA; note = HA-NLS-RNF125-(GS)1-3DX.2 nucleic acid
atgtacccatacgatgttccagattacgctccggcggcgaaacgcgtgaaactggatggcagcggcagcggcagcggctccgtgctgagcaccgacagcggcaaatcggcgcccgcctctgccaccgcgcgggccctggagcgcaggagggacccggagttgcccgtcacgtccttcgactgcgccgtgtgccttgaggtgttacaccagcctgtccggacccgctgcggccacgtattctgccgttcctgtattgctaccagtctgaagaacaacaagtggacctgtccttattgccgggcatatcttccttcagaaggagttccagcaactgatgtagccaaaagaatgaaatcagagtataagaactgcgctgagtgtgacaccctggtttgcctcagtgaaatgagggcacatattcggacttgtcagaagtacatagataagtatggaccaggcagcgatattgtgctgacccagagcccggcgagcctggcggtgagcctgggccagcgcgcgaccattagctgccgcgcgagcgaaagcgtggataactatggctttagctttatgaactggtttcagcagaaaccgggccagccgccgaaactgctgatttatgcgaccagcaaccgcggcagcggcgtgccggcgcgctttagcggcagcggcagcggcaccgattttagcctgaacattcatccggtggaagaagatgatagcgcgatgtatttttgccagcagaccaaagaagtgccgtggacctttggcggcggcaccaaactggaaattaaacgcggcggcggcggcagcggcggcggcgatagcggcggcggcggcagcgaagtgaaactggtggaaagcggcggcgatctggtgaaaccgggcggcagcctgaaactgagctgcgcggcgagcggctttacctttagccattatggcatgagctgggtgcgccagaccccggataaacgcctggaatgggtggcgaccattggcagccgcggcacctatacccattatccggatagcgtgaaaggccgctttaccattagccgcgataacgataaaaacgcgctgtatctgcagatgaacagcctgcgcaccgaagataccgcgatgtattattgcgcgcgcaaaagcgaattttattattatggcaacacctattattatagcgcgatggattattggggccagggcgcgagcgtgaccgtgagcagctaa

SEQ ID NO: 1339 - DNA, 1233 bp, synthetic construct
  source 1..1233: mol_type = other DNA; note = HA-NLS-RNF125-(GS)2-3DX.2 nucleic acid
atgtacccatacgatgttccagattacgctccggcggcgaaacgcgtgaaactggatggcagcggcagcggcagcggctccgtgctgagcaccgacagcggcaaatcggcgcccgcctctgccaccgcgcgggccctggagcgcaggagggacccggagttgcccgtcacgtccttcgactgcgccgtgtgccttgaggtgttacaccagcctgtccggacccgctgcggccacgtattctgccgttcctgtattgctaccagtctgaagaacaacaagtggacctgtccttattgccgggcatatcttccttcagaaggagttccagcaactgatgtagccaaaagaatgaaatcagagtataagaactgcgctgagtgtgacaccctggtttgcctcagtgaaatgagggcacatattcggacttgtcagaagtacatagataagtatggaccaggcagcggcagcgatattgtgctgacccagagcccggcgagcctggcggtgagcctgggccagcgcgcgaccattagctgccgcgcgagcgaaagcgtggataactatggctttagctttatgaactggtttcagcagaaaccgggccagccgccgaaactgctgatttatgcgaccagcaaccgcggcagcggcgtgccggcgcgctttagcggcagcggcagcggcaccgattttagcctgaacattcatccggtggaagaagatgatagcgcgatgtatttttgccagcagaccaaagaagtgccgtggacctttggcggcggcaccaaactggaaattaaacgcggcggcggcggcagcggcggcggcgatagcggcggcggcggcagcgaagtgaaactggtggaaagcggcggcgatctggtgaaaccgggcggcagcctgaaactgagctgcgcggcgagcggctttacctttagccattatggcatgagctgggtgcgccagaccccggataaacgcctggaatgggtggcgaccattggcagccgcggcacctatacccattatccggatagcgtgaaaggccgctttaccattagccgcgataacgataaaaacgcgctgtatctgcagatgaacagcctgcgcaccgaagataccgcgatgtattattgcgcgcgcaaaagcgaattttattattatggcaacacctattattatagcgcgatggattattggggccagggcgcgagcgtgaccgtgagcagctaa

SEQ ID NO: 1340 - DNA, 1239 bp, synthetic construct
  source 1..1239: mol_type = other DNA; note = HA-NLS-RNF125-(GS)3-3DX.2 nucleic acid
atgtacccatacgatgttccagattacgctccggcggcgaaacgcgtgaaactggatggcagcggcagcggcagcggctccgtgctgagcaccgacagcggcaaatcggcgcccgcctctgccaccgcgcgggccctggagcgcaggagggacccggagttgcccgtcacgtccttcgactgcgccgtgtgccttgaggtgttacaccagcctgtccggacccgctgcggccacgtattctgccgttcctgtattgctaccagtctgaagaacaacaagtggacctgtccttattgccgggcatatcttccttcagaaggagttccagcaactgatgtagccaaaagaatgaaatcagagtataagaactgcgctgagtgtgacaccctggtttgcctcagtgaaatgagggcacatattcggacttgtcagaagtacatagataagtatggaccaggcagcggcagcggcagcgatattgtgctgacccagagcccggcgagcctggcggtgagcctgggccagcgcgcgaccattagctgccgcgcgagcgaaagcgtggataactatggctttagctttatgaactggtttcagcagaaaccgggccagccgccgaaactgctgatttatgcgaccagcaaccgcggcagcggcgtgccggcgcgctttagcggcagcggcagcggcaccgattttagcctgaacattcatccggtggaagaagatgatagcgcgatgtatttttgccagcagaccaaagaagtgccgtggacctttggcggcggcaccaaactggaaattaaacgcggcggcggcggcagcggcggcggcgatagcggcggcggcggcagcgaagtgaaactggtggaaagcggcggcgatctggtgaaaccgggcggcagcctgaaactgagctgcgcggcgagcggctttacctttagccattatggcatgagctgggtgcgccagaccccggataaacgcctggaatgggtggcgaccattggcagccgcggcacctatacccattatccggatagcgtgaaaggccgctttaccattagccgcgataacgataaaaacgcgctgtatctgcagatgaacagcctgcgcaccgaagataccgcgatgtattattgcgcgcgcaaaagcgaattttattattatggcaacacctattattatagcgcgatggattattggggccagggcgcgagcgtgaccgtgagcagctaa

SEQ ID NO: 1341 - DNA, 1245 bp, synthetic construct
  source 1..1245: mol_type = other DNA; note = HA-NLS-RNF125-(GS)4-3DX.2 nucleic acid
atgtacccatacgatgttccagattacgctccggcggcgaaacgcgtgaaactggatggcagcggcagcggcagcggctccgtgctgagcaccgacagcggcaaatcggcgcccgcctctgccaccgcgcgggccctggagcgcaggagggacccggagttgcccgtcacgtccttcgactgcgccgtgtgccttgaggtgttacaccagcctgtccggacccgctgcggccacgtattctgccgttcctgtattgctaccagtctgaagaacaacaagtggacctgtccttattgccgggcatatcttccttcagaaggagttccagcaactgatgtagccaaaagaatgaaatcagagtataagaactgcgctgagtgtgacaccctggtttgcctcagtgaaatgagggcacatattcggacttgtcagaagtacatagataagtatggaccaggcagcggcagcggcagcggcagcgatattgtgctgacccagagcccggcgagcctggcggtgagcctgggccagcgcgcgaccattagctgccgcgcgagcgaaagcgtggataactatggctttagctttatgaactggtttcagcagaaaccgggccagccgccgaaactgctgatttatgcgaccagcaaccgcggcagcggcgtgccggcgcgctttagcggcagcggcagcggcaccgattttagcctgaacattcatccggtggaagaagatgatagcgcgatgtatttttgccagcagaccaaagaagtgccgtggacctttggcggcggcaccaaactggaaattaaacgcggcggcggcggcagcggcggcggcgatagcggcggcggcggcagcgaagtgaaactggtggaaagcggcggcgatctggtgaaaccgggcggcagcctgaaactgagctgcgcggcgagcggctttacctttagccattatggcatgagctgggtgcgccagaccccggataaacgcctggaatgggtggcgaccattggcagccgcggcacctatacccattatccggatagcgtgaaaggccgctttaccattagccgcgataacgataaaaacgcgctgtatctgcagatgaacagcctgcgcaccgaagataccgcgatgtattattgcgcgcgcaaaagcgaattttattattatggcaacacctattattatagcgcgatggattattggggccagggcgcgagcgtgaccgtgagcagctaa

SEQ ID NO: 1342 - DNA, 1251 bp, synthetic construct
  source 1..1251: mol_type = other DNA; note = HA-NLS-RNF125-(GS)5-3DX.2 nucleic acid
atgtacccatacgatgttccagattacgctccggcggcgaaacgcgtgaaactggatggcagcggcagcggcagcggctccgtgctgagcaccgacagcggcaaatcggcgcccgcctctgccaccgcgcgggccctggagcgcaggagggacccggagttgcccgtcacgtccttcgactgcgccgtgtgccttgaggtgttacaccagcctgtccggacccgctgcggccacgtattctgccgttcctgtattgctaccagtctgaagaacaacaagtggacctgtccttattgccgggcatatcttccttcagaaggagttccagcaactgatgtagccaaaagaatgaaatcagagtataagaactgcgctgagtgtgacaccctggtttgcctcagtgaaatgagggcacatattcggacttgtcagaagtacatagataagtatggaccaggcagcggcagcggcagcggcagcggcagcgatattgtgctgacccagagcccggcgagcctggcggtgagcctgggccagcgcgcgaccattagctgccgcgcgagcgaaagcgtggataactatggctttagctttatgaactggtttcagcagaaaccgggccagccgccgaaactgctgatttatgcgaccagcaaccgcggcagcggcgtgccggcgcgctttagcggcagcggcagcggcaccgattttagcctgaacattcatccggtggaagaagatgatagcgcgatgtatttttgccagcagaccaaagaagtgccgtggacctttggcggcggcaccaaactggaaattaaacgcggcggcggcggcagcggcggcggcgatagcggcggcggcggcagcgaagtgaaactggtggaaagcggcggcgatctggtgaaaccgggcggcagcctgaaactgagctgcgcggcgagcggctttacctttagccattatggcatgagctgggtgcgccagaccccggataaacgcctggaatgggtggcgaccattggcagccgcggcacctatacccattatccggatagcgtgaaaggccgctttaccattagccgcgataacgataaaaacgcgctgtatctgcagatgaacagcctgcgcaccgaagataccgcgatgtattattgcgcgcgcaaaagcgaattttattattatggcaacacctattattatagcgcgatggattattggggccagggcgcgagcgtgaccgtgagcagctaa

SEQ ID NO: 1343 - DNA, 1257 bp, synthetic construct
  source 1..1257: mol_type = other DNA; note = HA-NLS-RNF125-(GS)6-3DX.2 nucleic acid
atgtacccatacgatgttccagattacgctccggcggcgaaacgcgtgaaactggatggcagcggcagcggcagcggctccgtgctgagcaccgacagcggcaaatcggcgcccgcctctgccaccgcgcgggccctggagcgcaggagggacccggagttgcccgtcacgtccttcgactgcgccgtgtgccttgaggtgttacaccagcctgtccggacccgctgcggccacgtattctgccgttcctgtattgctaccagtctgaagaacaacaagtggacctgtccttattgccgggcatatcttccttcagaaggagttccagcaactgatgtagccaaaagaatgaaatcagagtataagaactgcgctgagtgtgacaccctggtttgcctcagtgaaatgagggcacatattcggacttgtcagaagtacatagataagtatggaccaggcagcggcagcggcagcggcagcggcagcggcagcgatattgtgctgacccagagcccggcgagcctggcggtgagcctgggccagcgcgcgaccattagctgccgcgcgagcgaaagcgtggataactatggctttagctttatgaactggtttcagcagaaaccgggccagccgccgaaactgctgatttatgcgaccagcaaccgcggcagcggcgtgccggcgcgctttagcggcagcggcagcggcaccgattttagcctgaacattcatccggtggaagaagatgatagcgcgatgtatttttgccagcagaccaaagaagtgccgtggacctttggcggcggcaccaaactggaaattaaacgcggcggcggcggcagcggcggcggcgatagcggcggcggcggcagcgaagtgaaactggtggaaagcggcggcgatctggtgaaaccgggcggcagcctgaaactgagctgcgcggcgagcggctttacctttagccattatggcatgagctgggtgcgccagaccccggataaacgcctggaatgggtggcgaccattggcagccgcggcacctatacccattatccggatagcgtgaaaggccgctttaccattagccgcgataacgataaaaacgcgctgtatctgcagatgaacagcctgcgcaccgaagataccgcgatgtattattgcgcgcgcaaaagcgaattttattattatggcaacacctattattatagcgcgatggattattggggccagggcgcgagcgtgaccgtgagcagctaa

SEQ ID NO: 1344 - DNA, 1494 bp, synthetic construct
  source 1..1494: mol_type = other DNA; note = 3DX.2-(GS)1-SPOP-NLS nucleic acid
atggatattgtgctgacccagagcccggcgagcctggcggtgagcctgggccagcgcgcgaccattagctgccgcgcgagcgaaagcgtggataactatggctttagctttatgaactggtttcagcagaaaccgggccagccgccgaaactgctgatttatgcgaccagcaaccgcggcagcggcgtgccggcgcgctttagcggcagcggcagcggcaccgattttagcctgaacattcatccggtggaagaagatgatagcgcgatgtatttttgccagcagaccaaagaagtgccgtggacctttggcggcggcaccaaactggaaattaaacgcggcggcggcggcagcggcggcggcgatagcggcggcggcggcagcgaagtgaaactggtggaaagcggcggcgatctggtgaaaccgggcggcagcctgaaactgagctgcgcggcgagcggctttacctttagccattatggcatgagctgggtgcgccagaccccggataaacgcctggaatgggtggcgaccattggcagccgcggcacctatacccattatccggatagcgtgaaaggccgctttaccattagccgcgataacgataaaaacgcgctgtatctgcagatgaacagcctgcgcaccgaagataccgcgatgtattattgcgcgcgcaaaagcgaattttattattatggcaacacctattattatagcgcgatggattattggggccagggcgcgagcgtgaccgtgagcagcggcagcaacgggcttctccctgatgacaagcttaccctcttctgcgaggtgagtgttgtgcaagattctgtcaacatttctggccagaataccatgaacatggtaaaggttcctgagtgccggctggcagatgagttaggaggactgtgggagaattcccggttcacagactgctgcttgtgtgttgccggccaggaattccaggctcacaaggctatcttagcagctcgttctccggtttttagtgccatgtttgaacatgaaatggaggagagcaaaaagaatcgagttgaaatcaatgatgtggagcctgaagtttttaaggaaatgatgtgcttcatttacacggggaaggctccaaacctcgacaaaatggctgatgatttgctggcagctgctgacaagtatgccctggagcgcttaaaggtcatgtgtgaggatgccctctgcagtaacctgtccgtggagaacgctgcagaaattctcatcctggccgacctccacagtgcagatcagttgaaaactcaggcagtggatttcatcaactatcatgcttcggatgtcttggagacctctgggtggaagtcaatggtggtgtcacatccccacttggtggctgaggcataccgctctctggcttcagcacagtgcccttttctgggacccccacgcaaacgcctgaagcaatccggcagcggcagcccggcggcgaaacgcgtgaaactggat

SEQ ID NO: 1345 - DNA, 1500 bp, synthetic construct
  source 1..1500: mol_type = other DNA; note = 3DX.2-(GS)2-SPOP-NLS nucleic acid
atggatattgtgctgacccagagcccggcgagcctggcggtgagcctgggccagcgcgcgaccattagctgccgcgcgagcgaaagcgtggataactatggctttagctttatgaactggtttcagcagaaaccgggccagccgccgaaactgctgatttatgcgaccagcaaccgcggcagcggcgtgccggcgcgctttagcggcagcggcagcggcaccgattttagcctgaacattcatccggtggaagaagatgatagcgcgatgtatttttgccagcagaccaaagaagtgccgtggacctttggcggcggcaccaaactggaaattaaacgcggcggcggcggcagcggcggcggcgatagcggcggcggcggcagcgaagtgaaactggtggaaagcggcggcgatctggtgaaaccgggcggcagcctgaaactgagctgcgcggcgagcggctttacctttagccattatggcatgagctgggtgcgccagaccccggataaacgcctggaatgggtggcgaccattggcagccgcggcacctatacccattatccggatagcgtgaaaggccgctttaccattagccgcgataacgataaaaacgcgctgtatctgcagatgaacagcctgcgcaccgaagataccgcgatgtattattgcgcgcgcaaaagcgaattttattattatggcaacacctattattatagcgcgatggattattggggccagggcgcgagcgtgaccgtgagcagcggcagcggcagcaacgggcttctccctgatgacaagcttaccctcttctgcgaggtgagtgttgtgcaagattctgtcaacatttctggccagaataccatgaacatggtaaaggttcctgagtgccggctggcagatgagttaggaggactgtgggagaattcccggttcacagactgctgcttgtgtgttgccggccaggaattccaggctcacaaggctatcttagcagctcgttctccggtttttagtgccatgtttgaacatgaaatggaggagagcaaaaagaatcgagttgaaatcaatgatgtggagcctgaagtttttaaggaaatgatgtgcttcatttacacggggaaggctccaaacctcgacaaaatggctgatgatttgctggcagctgctgacaagtatgccctggagcgcttaaaggtcatgtgtgaggatgccctctgcagtaacctgtccgtggagaacgctgcagaaattctcatcctggccgacctccacagtgcagatcagttgaaaactcaggcagtggatttcatcaactatcatgcttcggatgtcttggagacctctgggtggaagtcaatggtggtgtcacatccccacttggtggctgaggcataccgctctctggcttcagcacagtgcccttttctgggacccccacgcaaacgcctgaagcaatccggcagcggcagcccggcggcgaaacgcgtgaaactggat

SEQ ID NO: 1346 - DNA, 1506 bp, synthetic construct
  source 1..1506: mol_type = other DNA; note = 3DX.2-(GS)3-SPOP-NLS nucleic acid
atggatattgtgctgacccagagcccggcgagcctggcggtgagcctgggccagcgcgcgaccattagctgccgcgcgagcgaaagcgtggataactatggctttagctttatgaactggtttcagcagaaaccgggccagccgccgaaactgctgatttatgcgaccagcaaccgcggcagcggcgtgccggcgcgctttagcggcagcggcagcggcaccgattttagcctgaacattcatccggtggaagaagatgatagcgcgatgtatttttgccagcagaccaaagaagtgccgtggacctttggcggcggcaccaaactggaaattaaacgcggcggcggcggcagcggcggcggcgatagcggcggcggcggcagcgaagtgaaactggtggaaagcggcggcgatctggtgaaaccgggcggcagcctgaaactgagctgcgcggcgagcggctttacctttagccattatggcatgagctgggtgcgccagaccccggataaacgcctggaatgggtggcgaccattggcagccgcggcacctatacccattatccggatagcgtgaaaggccgctttaccattagccgcgataacgataaaaacgcgctgtatctgcagatgaacagcctgcgcaccgaagataccgcgatgtattattgcgcgcgcaaaagcgaattttattattatggcaacacctattattatagcgcgatggattattggggccagggcgcgagcgtgaccgtgagcagcggcagcggcagcggcagcaacgggcttctccctgatgacaagcttaccctcttctgcgaggtgagtgttgtgcaagattctgtcaacatttctggccagaataccatgaacatggtaaaggttcctgagtgccggctggcagatgagttaggaggactgtgggagaattcccggttcacagactgctgcttgtgtgttgccggccaggaattccaggctcacaaggctatcttagcagctcgttctccggtttttagtgccatgtttgaacatgaaatggaggagagcaaaaagaatcgagttgaaatcaatgatgtggagcctgaagtttttaaggaaatgatgtgcttcatttacacggggaaggctccaaacctcgacaaaatggctgatgatttgctggcagctgctgacaagtatgccctggagcgcttaaaggtcatgtgtgaggatgccctctgcagtaacctgtccgtggagaacgctgcagaaattctcatcctggccgacctccacagtgcagatcagttgaaaactcaggcagtggatttcatcaactatcatgcttcggatgtcttggagacctctgggtggaagtcaatggtggtgtcacatccccacttggtggctgaggcataccgctctctggcttcagcacagtgcccttttctgggacccccacgcaaacgcctgaagcaatccggcagcggcagcccggcggcgaaacgcgtgaaactggat

SEQ ID NO: 1347 - DNA, 1512 bp, synthetic construct
  source 1..1512: mol_type = other DNA; note = 3DX.2-(GS)4-SPOP-NLS nucleic acid
atggatattgtgctgacccagagcccggcgagcctggcggtgagcctgggccagcgcgcgaccattagctgccgcgcgagcgaaagcgtggataactatggctttagctttatgaactggtttcagcagaaaccgggccagccgccgaaactgctgatttatgcgaccagcaaccgcggcagcggcgtgccggcgcgctttagcggcagcggcagcggcaccgattttagcctgaacattcatccggtggaagaagatgatagcgcgatgtatttttgccagcagaccaaagaagtgccgtggacctttggcggcggcaccaaactggaaattaaacgcggcggcggcggcagcggcggcggcgatagcggcggcggcggcagcgaagtgaaactggtggaaagcggcggcgatctggtgaaaccgggcggcagcctgaaactgagctgcgcggcgagcggctttacctttagccattatggcatgagctgggtgcgccagaccccggataaacgcctggaatgggtggcgaccattggcagccgcggcacctatacccattatccggatagcgtgaaaggccgctttaccattagccgcgataacgataaaaacgcgctgtatctgcagatgaacagcctgcgcaccgaagataccgcgatgtattattgcgcgcgcaaaagcgaattttattattatggcaacacctattattatagcgcgatggattattggggccagggcgcgagcgtgaccgtgagcagcggcagcggcagcggcagcggcagcaacgggcttctccctgatgacaagcttaccctcttctgcgaggtgagtgttgtgcaagattctgtcaacatttctggccagaataccatgaacatggtaaaggttcctgagtgccggctggcagatgagttaggaggactgtgggagaattcccggttcacagactgctgcttgtgtgttgccggccaggaattccaggctcacaaggctatcttagcagctcgttctccggtttttagtgccatgtttgaacatgaaatggaggagagcaaaaagaatcgagttgaaatcaatgatgtggagcctgaagtttttaaggaaatgatgtgcttcatttacacggggaaggctccaaacctcgacaaaatggctgatgatttgctggcagctgctgacaagtatgccctggagcgcttaaaggtcatgtgtgaggatgccctctgcagtaacctgtccgtggagaacgctgcagaaattctcatcctggccgacctccacagtgcagatcagttgaaaactcaggcagtggatttcatcaactatcatgcttcggatgtcttggagacctctgggtggaagtcaatggtggtgtcacatccccacttggtggctgaggcataccgctctctggcttcagcacagtgcccttttctgggacccccacgcaaacgcctgaagcaatccggcagcggcagcccggcggcgaaacgcgtgaaactggat

SEQ ID NO: 1348 - DNA, 1518 bp, synthetic construct
  source 1..1518: mol_type = other DNA; note = 3DX.2-(GS)5-SPOP-NLS nucleic acid
atggatattgtgctgacccagagcccggcgagcctggcggtgagcctgggccagcgcgcgaccattagctgccgcgcgagcgaaagcgtggataactatggctttagctttatgaactggtttcagcagaaaccgggccagccgccgaaactgctgatttatgcgaccagcaaccgcggcagcggcgtgccggcgcgctttagcggcagcggcagcggcaccgattttagcctgaacattcatccggtggaagaagatgatagcgcgatgtatttttgccagcagaccaaagaagtgccgtggacctttggcggcggcaccaaactggaaattaaacgcggcggcggcggcagcggcggcggcgatagcggcggcggcggcagcgaagtgaaactggtggaaagcggcggcgatctggtgaaaccgggcggcagcctgaaactgagctgcgcggcgagcggctttacctttagccattatggcatgagctgggtgcgccagaccccggataaacgcctggaatgggtggcgaccattggcagccgcggcacctatacccattatccggatagcgtgaaaggccgctttaccattagccgcgataacgataaaaacgcgctgtatctgcagatgaacagcctgcgcaccgaagataccgcgatgtattattgcgcgcgcaaaagcgaattttattattatggcaacacctattattatagcgcgatggattattggggccagggcgcgagcgtgaccgtgagcagcggcagcggcagcggcagcggcagcggcagcaacgggcttctccctgatgacaagcttaccctcttctgcgaggtgagtgttgtgcaagattctgtcaacatttctggccagaataccatgaacatggtaaaggttcctgagtgccggctggcagatgagttaggaggactgtgggagaattcccggttcacagactgctgcttgtgtgttgccggccaggaattccaggctcacaaggctatcttagcagctcgttctccggtttttagtgccatgtttgaacatgaaatggaggagagcaaaaagaatcgagttgaaatcaatgatgtggagcctgaagtttttaaggaaatgatgtgcttcatttacacggggaaggctccaaacctcgacaaaatggctgatgatttgctggcagctgctgacaagtatgccctggagcgcttaaaggtcatgtgtgaggatgccctctgcagtaacctgtccgtggagaacgctgcagaaattctcatcctggccgacctccacagtgcagatcagttgaaaactcaggcagtggatttcatcaactatcatgcttcggatgtcttggagacctctgggtggaagtcaatggtggtgtcacatccccacttggtggctgaggcataccgctctctggcttcagcacagtgcccttttctgggacccccacgcaaacgcctgaagcaatccggcagcggcagcccggcggcgaaacgcgtgaaactggat

SEQ ID NO: 1349 - DNA, 1524 bp, synthetic construct
  source 1..1524: mol_type = other DNA; note = 3DX.2-(GS)6-SPOP-NLS nucleic acid
atggatattgtgctgacccagagcccggcgagcctggcggtgagcctgggccagcgcgcgaccattagctgccgcgcgagcgaaagcgtggataactatggctttagctttatgaactggtttcagcagaaaccgggccagccgccgaaactgctgatttatgcgaccagcaaccgcggcagcggcgtgccggcgcgctttagcggcagcggcagcggcaccgattttagcctgaacattcatccggtggaagaagatgatagcgcgatgtatttttgccagcagaccaaagaagtgccgtggacctttggcggcggcaccaaactggaaattaaacgcggcggcggcggcagcggcggcggcgatagcggcggcggcggcagcgaagtgaaactggtggaaagcggcggcgatctggtgaaaccgggcggcagcctgaaactgagctgcgcggcgagcggctttacctttagccattatggcatgagctgggtgcgccagaccccggataaacgcctggaatgggtggcgaccattggcagccgcggcacctatacccattatccggatagcgtgaaaggccgctttaccattagccgcgataacgataaaaacgcgctgtatctgcagatgaacagcctgcgcaccgaagataccgcgatgtattattgcgcgcgcaaaagcgaattttattattatggcaacacctattattatagcgcgatggattattggggccagggcgcgagcgtgaccgtgagcagcggcagcggcagcggcagcggcagcggcagcggcagcaacgggcttctccctgatgacaagcttaccctcttctgcgaggtgagtgttgtgcaagattctgtcaacatttctggccagaataccatgaacatggtaaaggttcctgagtgccggctggcagatgagttaggaggactgtgggagaattcccggttcacagactgctgcttgtgtgttgccggccaggaattccaggctcacaaggctatcttagcagctcgttctccggtttttagtgccatgtttgaacatgaaatggaggagagcaaaaagaatcgagttgaaatcaatgatgtggagcctgaagtttttaaggaaatgatgtgcttcatttacacggggaaggctccaaacctcgacaaaatggctgatgatttgctggcagctgctgacaagtatgccctggagcgcttaaaggtcatgtgtgaggatgccctctgcagtaacctgtccgtggagaacgctgcagaaattctcatcctggccgacctccacagtgcagatcagttgaaaactcaggcagtggatttcatcaactatcatgcttcggatgtcttggagacctctgggtggaagtcaatggtggtgtcacatccccacttggtggctgaggcataccgctctctggcttcagcacagtgcccttttctgggacccccacgcaaacgcctgaagcaatccggcagcggcagcccggcggcgaaacgcgtgaaactggat

SEQ ID NO: 1350 - DNA, 1524 bp, synthetic construct
  source 1..1524: mol_type = other DNA; note = 3DX.2-(GS)1-SPOP-NLS-HA nucleic acid
atggatattgtgctgacccagagcccggcgagcctggcggtgagcctgggccagcgcgcgaccattagctgccgcgcgagcgaaagcgtggataactatggctttagctttatgaactggtttcagcagaaaccgggccagccgccgaaactgctgatttatgcgaccagcaaccgcggcagcggcgtgccggcgcgctttagcggcagcggcagcggcaccgattttagcctgaacattcatccggtggaagaagatgatagcgcgatgtatttttgccagcagaccaaagaagtgccgtggacctttggcggcggcaccaaactggaaattaaacgcggcggcggcggcagcggcggcggcgatagcggcggcggcggcagcgaagtgaaactggtggaaagcggcggcgatctggtgaaaccgggcggcagcctgaaactgagctgcgcggcgagcggctttacctttagccattatggcatgagctgggtgcgccagaccccggataaacgcctggaatgggtggcgaccattggcagccgcggcacctatacccattatccggatagcgtgaaaggccgctttaccattagccgcgataacgataaaaacgcgctgtatctgcagatgaacagcctgcgcaccgaagataccgcgatgtattattgcgcgcgcaaaagcgaattttattattatggcaacacctattattatagcgcgatggattattggggccagggcgcgagcgtgaccgtgagcagcggcagcaacgggcttctccctgatgacaagcttaccctcttctgcgaggtgagtgttgtgcaagattctgtcaacatttctggccagaataccatgaacatggtaaaggttcctgagtgccggctggcagatgagttaggaggactgtgggagaattcccggttcacagactgctgcttgtgtgttgccggccaggaattccaggctcacaaggctatcttagcagctcgttctccggtttttagtgccatgtttgaacatgaaatggaggagagcaaaaagaatcgagttgaaatcaatgatgtggagcctgaagtttttaaggaaatgatgtgcttcatttacacggggaaggctccaaacctcgacaaaatggctgatgatttgctggcagctgctgacaagtatgccctggagcgcttaaaggtcatgtgtgaggatgccctctgcagtaacctgtccgtggagaacgctgcagaaattctcatcctggccgacctccacagtgcagatcagttgaaaactcaggcagtggatttcatcaactatcatgcttcggatgtcttggagacctctgggtggaagtcaatggtggtgtcacatccccacttggtggctgaggcataccgctctctggcttcagcacagtgcccttttctgggacccccacgcaaacgcctgaagcaatccggcagcggcagcccggcggcgaaacgcgtgaaactggattacccatacgatgttccagattacgcttaa

SEQ ID NO: 1351 - DNA, 1530 bp, synthetic construct
  source 1..1530: mol_type = other DNA; note = 3DX.2-(GS)2-SPOP-NLS-HA nucleic acid
atggatattgtgctgacccagagcccggcgagcctggcggtgagcctgggccagcgcgcgaccattagctgccgcgcgagcgaaagcgtggataactatggctttagctttatgaactggtttcagcagaaaccgggccagccgccgaaactgctgatttatgcgaccagcaaccgcggcagcggcgtgccggcgcgctttagcggcagcggcagcggcaccgattttagcctgaacattcatccggtggaagaagatgatagcgcgatgtatttttgccagcagaccaaagaagtgccgtggacctttggcggcggcaccaaactggaaattaaacgcggcggcggcggcagcggcggcggcgatagcggcggcggcggcagcgaagtgaaactggtggaaagcggcggcgatctggtgaaaccgggcggcagcctgaaactgagctgcgcggcgagcggctttacctttagccattatggcatgagctgggtgcgccagaccccggataaacgcctggaatgggtggcgaccattggcagccgcggcacctatacccattatccggatagcgtgaaaggccgctttaccattagccgcgataacgataaaaacgcgctgtatctgcagatgaacagcctgcgcaccgaagataccgcgatgtattattgcgcgcgcaaaagcgaattttattattatggcaacacctattattatagcgcgatggattattggggccagggcgcgagcgtgaccgtgagcagcggcagcggcagcaacgggcttctccctgatgacaagcttaccctcttctgcgaggtgagtgttgtgcaagattctgtcaacatttctggccagaataccatgaacatggtaaaggttcctgagtgccggctggcagatgagttaggaggactgtgggagaattcccggttcacagactgctgcttgtgtgttgccggccaggaattccaggctcacaaggctatcttagcagctcgttctccggtttttagtgccatgtttgaacatgaaatggaggagagcaaaaagaatcgagttgaaatcaatgatgtggagcctgaagtttttaaggaaatgatgtgcttcatttacacggggaaggctccaaacctcgacaaaatggctgatgatttgctggcagctgctgacaagtatgccctggagcgcttaaaggtcatgtgtgaggatgccctctgcagtaacctgtccgtggagaacgctgcagaaattctcatcctggccgacctccacagtgcagatcagttgaaaactcaggcagtggatttcatcaactatcatgcttcggatgtcttggagacctctgggtggaagtcaatggtggtgtcacatccccacttggtggctgaggcataccgctctctggcttcagcacagtgcccttttctgggacccccacgcaaacgcctgaagcaatccggcagcggcagcccggcggcgaaacgcgtgaaactggattacccatacgatgttccagattacgcttaa

SEQ ID NO: 1352 - DNA, 1536 bp, synthetic construct
  source 1..1536: mol_type = other DNA; note = 3DX.2-(GS)3-SPOP-NLS-HA nucleic acid
atggatattgtgctgacccagagcccggcgagcctggcggtgagcctgggccagcgcgcgaccattagctgccgcgcgagcgaaagcgtggataactatggctttagctttatgaactggtttcagcagaaaccgggccagccgccgaaactgctgatttatgcgaccagcaaccgcggcagcggcgtgccggcgcgctttagcggcagcggcagcggcaccgattttagcctgaacattcatccggtggaagaagatgatagcgcgatgtatttttgccagcagaccaaagaagtgccgtggacctttggcggcggcaccaaactggaaattaaacgcggcggcggcggcagcggcggcggcgatagcggcggcggcggcagcgaagtgaaactggtggaaagcggcggcgatctggtgaaaccgggcggcagcctgaaactgagctgcgcggcgagcggctttacctttagccattatggcatgagctgggtgcgccagaccccggataaacgcctggaatgggtggcgaccattggcagccgcggcacctatacccattatccggatagcgtgaaaggccgctttaccattagccgcgataacgataaaaacgcgctgtatctgcagatgaacagcctgcgcaccgaagataccgcgatgtattattgcgcgcgcaaaagcgaattttattattatggcaacacctattattatagcgcgatggattattggggccagggcgcgagcgtgaccgtgagcagcggcagcggcagcggcagcaacgggcttctccctgatgacaagcttaccctcttctgcgaggtgagtgttgtgcaagattctgtcaacatttctggccagaataccatgaacatggtaaaggttcctgagtgccggctggcagatgagttaggaggactgtgggagaattcccggttcacagactgctgcttgtgtgttgccggccaggaattccaggctcacaaggctatcttagcagctcgttctccggtttttagtgccatgtttgaacatgaaatggaggagagcaaaaagaatcgagttgaaatcaatgatgtggagcctgaagtttttaaggaaatgatgtgcttcatttacacggggaaggctccaaacctcgacaaaatggctgatgatttgctggcagctgctgacaagtatgccctggagcgcttaaaggtcatgtgtgaggatgccctctgcagtaacctgtccgtggagaacgctgcagaaattctcatcctggccgacctccacagtgcagatcagttgaaaactcaggcagtggatttcatcaactatcatgcttcggatgtcttggagacctctgggtggaagtcaatggtggtgtcacatccccacttggtggctgaggcataccgctctctggcttcagcacagtgcccttttctgggacccccacgcaaacgcctgaagcaatccggcagcggcagcccggcggcgaaacgcgtgaaactggattacccatacgatgttccagattacgcttaa

SEQ ID NO: 1353 - DNA, 1542 bp, synthetic construct
  source 1..1542: mol_type = other DNA; note = 3DX.2-(GS)4-SPOP-NLS-HA nucleic acid
atggatattgtgctgacccagagcccggcgagcctggcggtgagcctgggccagcgcgcgaccattagctgccgcgcgagcgaaagcgtggataactatggctttagctttatgaactggtttcagcagaaaccgggccagccgccgaaactgctgatttatgcgaccagcaaccgcggcagcggcgtgccggcgcgctttagcggcagcggcagcggcaccgattttagcctgaacattcatccggtggaagaagatgatagcgcgatgtatttttgccagcagaccaaagaagtgccgtggacctttggcggcggcaccaaactggaaattaaacgcggcggcggcggcagcggcggcggcgatagcggcggcggcggcagcgaagtgaaactggtggaaagcggcggcgatctggtgaaaccgggcggcagcctgaaactgagctgcgcggcgagcggctttacctttagccattatggcatgagctgggtgcgccagaccccggataaacgcctggaatgggtggcgaccattggcagccgcggcacctatacccattatccggatagcgtgaaaggccgctttaccattagccgcgataacgataaaaacgcgctgtatctgcagatgaacagcctgcgcaccgaagataccgcgatgtattattgcgcgcgcaaaagcgaattttattattatggcaacacctattattatagcgcgatggattattggggccagggcgcgagcgtgaccgtgagcagcggcagcggcagcggcagcggcagcaacgggcttctccctgatgacaagcttaccctcttctgcgaggtgagtgttgtgcaagattctgtcaacatttctggccagaataccatgaacatggtaaaggttcctgagtgccggctggcagatgagttaggaggactgtgggagaattcccggttcacagactgctgcttgtgtgttgccggccaggaattccaggctcacaaggctatcttagcagctcgttctccggtttttagtgccatgtttgaacatgaaatggaggagagcaaaaagaatcgagttgaaatcaatgatgtggagcctgaagtttttaaggaaatgatgtgcttcatttacacggggaaggctccaaacctcgacaaaatggctgatgatttgctggcagctgctgacaagtatgccctggagcgcttaaaggtcatgtgtgaggatgccctctgcagtaacctgtccgtggagaacgctgcagaaattctcatcctggccgacctccacagtgcagatcagttgaaaactcaggcagtggatttcatcaactatcatgcttcggatgtcttggagacctctgggtggaagtcaatggtggtgtcacatccccacttggtggctgaggcataccgctctctggcttcagcacagtgcccttttctgggacccccacgcaaacgcctgaagcaatccggcagcggcagcccggcggcgaaacgcgtgaaactggattacccatacgatgttccagattacgcttaa

SEQ ID NO: 1354 - DNA, 1548 bp, synthetic construct
  source 1..1548: mol_type = other DNA; note = 3DX.2-(GS)5-SPOP-NLS-HA nucleic acid
atggatattgtgctgacccagagcccggcgagcctggcggtgagcctgggccagcgcgcgaccattagctgccgcgcgagcgaaagcgtggataactatggctttagctttatgaactggtttcagcagaaaccgggccagccgccgaaactgctgatttatgcgaccagcaaccgcggcagcggcgtgccggcgcgctttagcggcagcggcagcggcaccgattttagcctgaacattcatccggtggaagaagatgatagcgcgatgtatttttgccagcagaccaaagaagtgccgtggacctttggcggcggcaccaaactggaaattaaacgcggcggcggcggcagcggcggcggcgatagcggcggcggcggcagcgaagtgaaactggtggaaagcggcggcgatctggtgaaaccgggcggcagcctgaaactgagctgcgcggcgagcggctttacctttagccattatggcatgagctgggtgcgccagaccccggataaacgcctggaatgggtggcgaccattggcagccgcggcacctatacccattatccggatagcgtgaaaggccgctttaccattagccgcgataacgataaaaacgcgctgtatctgcagatgaacagcctgcgcaccgaagataccgcgatgtattattgcgcgcgcaaaagcgaattttattattatggcaacacctattattatagcgcgatggattattggggccagggcgcgagcgtgaccgtgagcagcggcagcggcagcggcagcggcagcggcagcaacgggcttctccctgatgacaagcttaccctcttctgcgaggtgagtgttgtgcaagattctgtcaacatttctggccagaataccatgaacatggtaaaggttcctgagtgccggctggcagatgagttaggaggactgtgggagaattcccggttcacagactgctgcttgtgtgttgccggccaggaattccaggctcacaaggctatcttagcagctcgttctccggtttttagtgccatgtttgaacatgaaatggaggagagcaaaaagaatcgagttgaaatcaatgatgtggagcctgaagtttttaaggaaatgatgtgcttcatttacacggggaaggctccaaacctcgacaaaatggctgatgatttgctggcagctgctgacaagtatgccctggagcgcttaaaggtcatgtgtgaggatgccctctgcagtaacctgtccgtggagaacgctgcagaaattctcatcctggccgacctccacagtgcagatcagttgaaaactcaggcagtggatttcatcaactatcatgcttcggatgtcttggagacctctgggtggaagtcaatggtggtgtcacatccccacttggtggctgaggcataccgctctctggcttcagcacagtgcccttttctgggacccccacgcaaacgcctgaagcaatccggcagcggcagcccggcggcgaaacgcgtgaaactggattacccatacgatgttccagattacgcttaa

SEQ ID NO: 1355 - DNA, 1554 bp, synthetic construct
  source 1..1554: mol_type = other DNA; note = 3DX.2-(GS)6-SPOP-NLS-HA nucleic acid
atggatattgtgctgacccagagcccggcgagcctggcggtgagcctgggccagcgcgcgaccattagctgccgcgcgagcgaaagcgtggataactatggctttagctttatgaactggtttcagcagaaaccgggccagccgccgaaactgctgatttatgcgaccagcaaccgcggcagcggcgtgccggcgcgctttagcggcagcggcagcggcaccgattttagcctgaacattcatccggtggaagaagatgatagcgcgatgtatttttgccagcagaccaaagaagtgccgtggacctttggcggcggcaccaaactggaaattaaacgcggcggcggcggcagcggcggcggcgatagcggcggcggcggcagcgaagtgaaactggtggaaagcggcggcgatctggtgaaaccgggcggcagcctgaaactgagctgcgcggcgagcggctttacctttagccattatggcatgagctgggtgcgccagaccccggataaacgcctggaatgggtggcgaccattggcagccgcggcacctatacccattatccggatagcgtgaaaggccgctttaccattagccgcgataacgataaaaacgcgctgtatctgcagatgaacagcctgcgcaccgaagataccgcgatgtattattgcgcgcgcaaaagcgaattttattattatggcaacacctattattatagcgcgatggattattggggccagggcgcgagcgtgaccgtgagcagcggcagcggcagcggcagcggcagcggcagcggcagcaacgggcttctccctgatgacaagcttaccctcttctgcgaggtgagtgttgtgcaagattctgtcaacatttctggccagaataccatgaacatggtaaaggttcctgagtgccggctggcagatgagttaggaggactgtgggagaattcccggttcacagactgctgcttgtgtgttgccggccaggaattccaggctcacaaggctatcttagcagctcgttctccggtttttagtgccatgtttgaacatgaaatggaggagagcaaaaagaatcgagttgaaatcaatgatgtggagcctgaagtttttaaggaaatgatgtgcttcatttacacggggaaggctccaaacctcgacaaaatggctgatgatttgctggcagctgctgacaagtatgccctggagcgcttaaaggtcatgtgtgaggatgccctctgcagtaacctgtccgtggagaacgctgcagaaattctcatcctggccgacctccacagtgcagatcagttgaaaactcaggcagtggatttcatcaactatcatgcttcggatgtcttggagacctctgggtggaagtcaatggtggtgtcacatccccacttggtggctgaggcataccgctctctggcttcagcacagtgcccttttctgggacccccacgcaaacgcctgaagcaatccggcagcggcagcccggcggcgaaacgcgtgaaactggattacccatacgatgttccagattacgcttaa

SEQ ID NO: 1356 - DNA, 852 bp, synthetic construct
  source 1..852: mol_type = other DNA; note = OMOMYC-(GS)1-CHIP-NLS nucleic acid
atgtctgataccgaggaaaatgtcaagcggagaacccacaacgtgctggaaagacagagacggaatgagctgaagcgctccttcttcgccctgcgggaccagatccccgagctggaaaacaacgagaaggcccctaaggtggtgatcctgaaaaaggctacagcctacatcctgagcgtgcaggccgagacccagaaactgatcagcgagatcgacctgctgagaaagcagaacgagcagctgaagcacaagctggaacaactcagaaacagctgcgccggcagccggctgaacttcggggacgacatccccagcgctcttcgaatcgcgaagaagaagcgctggaacagcattgaggagcggcgcatccaccaggagagcgagctgcactcctacctctccaggctcattgccgcggagcgtgagagggagctggaagagtgccagcgaaaccacgagggtgatgaggacgacagccacgtccgggcccagcaggcctgcattgaggccaagcacgacaagtacatggcggacatggacgagcttttttctcaggtggatgagaagaggaagaagcgagacatccccgactacctgtgtggcaagatcagctttgagctgatgcgggagccgtgcatcacgcccagtggcatcacctacgaccgcaaggacatcgaggagcacctgcagcgtgtgggtcattttgacccggtgaccaggagccccctgacccaggaacagctcatccccaacttggctatgaaggaggttattgacgcattcatctctgagaatggctgggtggaggactacggcagcggcagcccggcggcgaaacgcgtgaaactggat

SEQ ID NO: 1357 - DNA, 858 bp, synthetic construct
  source 1..858: mol_type = other DNA; note = OMOMYC-(GS)2-CHIP-NLS nucleic acid
atgtctgataccgaggaaaatgtcaagcggagaacccacaacgtgctggaaagacagagacggaatgagctgaagcgctccttcttcgccctgcgggaccagatccccgagctggaaaacaacgagaaggcccctaaggtggtgatcctgaaaaaggctacagcctacatcctgagcgtgcaggccgagacccagaaactgatcagcgagatcgacctgctgagaaagcagaacgagcagctgaagcacaagctggaacaactcagaaacagctgcgccggcagcggcagccggctgaacttcggggacgacatccccagcgctcttcgaatcgcgaagaagaagcgctggaacagcattgaggagcggcgcatccaccaggagagcgagctgcactcctacctctccaggctcattgccgcggagcgtgagagggagctggaagagtgccagcgaaaccacgagggtgatgaggacgacagccacgtccgggcccagcaggcctgcattgaggccaagcacgacaagtacatggcggacatggacgagcttttttctcaggtggatgagaagaggaagaagcgagacatccccgactacctgtgtggcaagatcagctttgagctgatgcgggagccgtgcatcacgcccagtggcatcacctacgaccgcaaggacatcgaggagcacctgcagcgtgtgggtcattttgacccggtgaccaggagccccctgacccaggaacagctcatccccaacttggctatgaaggaggttattgacgcattcatctctgagaatggctgggtggaggactacggcagcggcagcccggcggcgaaacgcgtgaaactggat

SEQ ID NO: 1358 - DNA, 864 bp, synthetic construct
  source 1..864: mol_type = other DNA; note = OMOMYC-(GS)3-CHIP-NLS nucleic acid
atgtctgataccgaggaaaatgtcaagcggagaacccacaacgtgctggaaagacagagacggaatgagctgaagcgctccttcttcgccctgcgggaccagatccccgagctggaaaacaacgagaaggcccctaaggtggtgatcctgaaaaaggctacagcctacatcctgagcgtgcaggccgagacccagaaactgatcagcgagatcgacctgctgagaaagcagaacgagcagctgaagcacaagctggaacaactcagaaacagctgcgccggcagcggcagcggcagccggctgaacttcggggacgacatccccagcgctcttcgaatcgcgaagaagaagcgctggaacagcattgaggagcggcgcatccaccaggagagcgagctgcactcctacctctccaggctcattgccgcggagcgtgagagggagctggaagagtgccagcgaaaccacgagggtgatgaggacgacagccacgtccgggcccagcaggcctgcattgaggccaagcacgacaagtacatggcggacatggacgagcttttttctcaggtggatgagaagaggaagaagcgagacatccccgactacctgtgtggcaagatcagctttgagctgatgcgggagccgtgcatcacgcccagtggcatcacctacgaccgcaaggacatcgaggagcacctgcagcgtgtgggtcattttgacccggtgaccaggagccccctgacccaggaacagctcatccccaacttggctatgaaggaggttattgacgcattcatctctgagaatggctgggtggaggactacggcagcggcagcccggcggcgaaacgcgtgaaactggat

SEQ ID NO: 1359 - DNA, 870 bp, synthetic construct
  source 1..870: mol_type = other DNA; note = OMOMYC-(GS)4-CHIP-NLS nucleic acid
atgtctgataccgaggaaaatgtcaagcggagaacccacaacgtgctggaaagacagagacggaatgagctgaagcgctccttcttcgccctgcgggaccagatccccgagctggaaaacaacgagaaggcccctaaggtggtgatcctgaaaaaggctacagcctacatcctgagcgtgcaggccgagacccagaaactgatcagcgagatcgacctgctgagaaagcagaacgagcagctgaagcacaagctggaacaactcagaaacagctgcgccggcagcggcagcggcagcggcagccggctgaacttcggggacgacatccccagcgctcttcgaatcgcgaagaagaagcgctggaacagcattgaggagcggcgcatccaccaggagagcgagctgcactcctacctctccaggctcattgccgcggagcgtgagagggagctggaagagtgccagcgaaaccacgagggtgatgaggacgacagccacgtccgggcccagcaggcctgcattgaggccaagcacgacaagtacatggcggacatggacgagcttttttctcaggtggatgagaagaggaagaagcgagacatccccgactacctgtgtggcaagatcagctttgagctgatgcgggagccgtgcatcacgcccagtggcatcacctacgaccgcaaggacatcgaggagcacctgcagcgtgtgggtcattttgacccggtgaccaggagccccctgacccaggaacagctcatccccaacttggctatgaaggaggttattgacgcattcatctctgagaatggctgggtggaggactacggcagcggcagcccggcggcgaaacgcgtgaaactggat

SEQ ID NO: 1360 - DNA, 876 bp, synthetic construct
  source 1..876: mol_type = other DNA; note = OMOMYC-(GS)5-CHIP-NLS nucleic acid
atgtctgataccgaggaaaatgtcaagcggagaacccacaacgtgctggaaagacagagacggaatgagctgaagcgctccttcttcgccctgcgggaccagatccccgagctggaaaacaacgagaaggcccctaaggtggtgatcctgaaaaaggctacagcctacatcctgagcgtgcaggccgagacccagaaactgatcagcgagatcgacctgctgagaaagcagaacgagcagctgaagcacaagctggaacaactcagaaacagctgcgccggcagcggcagcggcagcggcagcggcagccggctgaacttcggggacgacatccccagcgctcttcgaatcgcgaagaagaagcgctggaacagcattgaggagcggcgcatccaccaggagagcgagctgcactcctacctctccaggctcattgccgcggagcgtgagagggagctggaagagtgccagcgaaaccacgagggtgatgaggacgacagccacgtccgggcccagcaggcctgcattgaggccaagcacgacaagtacatggcggacatggacgagcttttttctcaggtggatgagaagaggaagaagcgagacatccccgactacctgtgtggcaagatcagctttgagctgatgcgggagccgtgcatcacgcccagtggcatcacctacgaccgcaaggacatcgaggagcacctgcagcgtgtgggtcattttgacccggtgaccaggagccccctgacccaggaacagctcatccccaacttggctatgaaggaggttattgacgcattcatctctgagaatggctgggtggaggactacggcagcggcagcccggcggcgaaacgcgtgaaactggat

SEQ ID NO: 1361 - DNA, 882 bp, synthetic construct
  source 1..882: mol_type = other DNA; note = OMOMYC-(GS)6-CHIP-NLS nucleic acid
atgtctgataccgaggaaaatgtcaagcggagaacccacaacgtgctggaaagacagagacggaatgagctgaagcgctccttcttcgccctgcgggaccagatccccgagctggaaaacaacgagaaggcccctaaggtggtgatcctgaaaaaggctacagcctacatcctgagcgtgcaggccgagacccagaaactgatcagcgagatcgacctgctgagaaagcagaacgagcagctgaagcacaagctggaacaactcagaaacagctgcgccggcagcggcagcggcagcggcagcggcagcggcagccggctgaacttcggggacgacatccccagcgctcttcgaatcgcgaagaagaagcgctggaacagcattgaggagcggcgcatccaccaggagagcgagctgcactcctacctctccaggctcattgccgcggagcgtgagagggagctggaagagtgccagcgaaaccacgagggtgatgaggacgacagccacgtccgggcccagcaggcctgcattgaggccaagcacgacaagtacatggcggacatggacgagcttttttctcaggtggatgagaagaggaagaagcgagacatccccgactacctgtgtggcaagatcagctttgagctgatgcgggagccgtgcatcacgcccagtggcatcacctacgaccgcaaggacatcgaggagcacctgcagcgtgtgggtcattttgacccggtgaccaggagccccctgacccaggaacagctcatccccaacttggctatgaaggaggttattgacgcattcatctctgagaatggctgggtggaggactacggcagcggcagcccggcggcgaaacgcgtgaaactggat

SEQ ID NO: 1362 - DNA, 882 bp, synthetic construct
  source 1..882: mol_type = other DNA; note = OMOMYC-(GS)1-CHIP-NLS-HA nucleic acid
atgtctgataccgaggaaaatgtcaagcggagaacccacaacgtgctggaaagacagagacggaatgagctgaagcgctccttcttcgccctgcgggaccagatccccgagctggaaaacaacgagaaggcccctaaggtggtgatcctgaaaaaggctacagcctacatcctgagcgtgcaggccgagacccagaaactgatcagcgagatcgacctgctgagaaagcagaacgagcagctgaagcacaagctggaacaactcagaaacagctgcgccggcagccggctgaacttcggggacgacatccccagcgctcttcgaatcgcgaagaagaagcgctggaacagcattgaggagcggcgcatccaccaggagagcgagctgcactcctacctctccaggctcattgccgcggagcgtgagagggagctggaagagtgccagcgaaaccacgagggtgatgaggacgacagccacgtccgggcccagcaggcctgcattgaggccaagcacgacaagtacatggcggacatggacgagcttttttctcaggtggatgagaagaggaagaagcgagacatccccgactacctgtgtggcaagatcagctttgagctgatgcgggagccgtgcatcacgcccagtggcatcacctacgaccgcaaggacatcgaggagcacctgcagcgtgtgggtcattttgacccggtgaccaggagccccctgacccaggaacagctcatccccaacttggctatgaaggaggttattgacgcattcatctctgagaatggctgggtggaggactacggcagcggcagcccggcggcgaaacgcgtgaaactggattacccatacgatgttccagattacgcttaa

SEQ ID NO: 1363 - DNA, 888 bp, synthetic construct
  source 1..888: mol_type = other DNA; note = OMOMYC-(GS)2-CHIP-NLS-HA nucleic acid
atgtctgataccgaggaaaatgtcaagcggagaacccacaacgtgctggaaagacagagacggaatgagctgaagcgctccttcttcgccctgcgggaccagatccccgagctggaaaacaacgagaaggcccctaaggtggtgatcctgaaaaaggctacagcctacatcctgagcgtgcaggccgagacccagaaactgatcagcgagatcgacctgctgagaaagcagaacgagcagctgaagcacaagctggaacaactcagaaacagctgcgccggcagcggcagccggctgaacttcggggacgacatccccagcgctcttcgaatcgcgaagaagaagcgctggaacagcattgaggagcggcgcatccaccaggagagcgagctgcactcctacctctccaggctcattgccgcggagcgtgagagggagctggaagagtgccagcgaaaccacgagggtgatgaggacgacagccacgtccgggcccagcaggcctgcattgaggccaagcacgacaagtacatggcggacatggacgagcttttttctcaggtggatgagaagaggaagaagcgagacatccccgactacctgtgtggcaagatcagctttgagctgatgcgggagccgtgcatcacgcccagtggcatcacctacgaccgcaaggacatcgaggagcacctgcagcgtgtgggtcattttgacccggtgaccaggagccccctgacccaggaacagctcatccccaacttggctatgaaggaggttattgacgcattcatctctgagaatggctgggtggaggactacggcagcggcagcccggcggcgaaacgcgtgaaactggattacccatacgatgttccagattacgcttaa

SEQ ID NO: 1364 - DNA, 894 bp, synthetic construct
  source 1..894: mol_type = other DNA; note = OMOMYC-(GS)3-CHIP-NLS-HA nucleic acid
atgtctgataccgaggaaaatgtcaagcggagaacccacaacgtgctggaaagacagagacggaatgagctgaagcgctccttcttcgccctgcgggaccagatccccgagctggaaaacaacgagaaggcccctaaggtggtgatcctgaaaaaggctacagcctacatcctgagcgtgcaggccgagacccagaaactgatcagcgagatcgacctgctgagaaagcagaacgagcagctgaagcacaagctggaacaactcagaaacagctgcgccggcagcggcagcggcagccggctgaacttcggggacgacatccccagcgctcttcgaatcgcgaagaagaagcgctggaacagcattgaggagcggcgcatccaccaggagagcgagctgcactcctacctctccaggctcattgccgcggagcgtgagagggagctggaagagtgccagcgaaaccacgagggtgatgaggacgacagccacgtccgggcccagcaggcctgcattgaggccaagcacgacaagtacatggcggacatggacgagcttttttctcaggtggatgagaagaggaagaagcgagacatccccgactacctgtgtggcaagatcagctttgagctgatgcgggagccgtgcatcacgcccagtggcatcacctacgaccgcaaggacatcgaggagcacctgcagcgtgtgggtcattttgacccggtgaccaggagccccctgacccaggaacagctcatccccaacttggctatgaaggaggttattgacgcattcatctctgagaatggctgggtggaggactacggcagcggcagcccggcggcgaaacgcgtgaaactggattacccatacgatgttccagattacgcttaa

SEQ ID NO: 1365 - DNA, 900 bp, synthetic construct
  source 1..900: mol_type = other DNA; note = OMOMYC-(GS)4-CHIP-NLS-HA nucleic acid
atgtctgataccgaggaaaatgtcaagcggagaacccacaacgtgctggaaagacagagacggaatgagctgaagcgctccttcttcgccctgcgggaccagatccccgagctggaaaacaacgagaaggcccctaaggtggtgatcctgaaaaaggctacagcctacatcctgagcgtgcaggccgagacccagaaactgatcagcgagatcgacctgctgagaaagcagaacgagcagctgaagcacaagctggaacaactcagaaacagctgcgccggcagcggcagcggcagcggcagccggctgaacttcggggacgacatccccagcgctcttcgaatcgcgaagaagaagcgctggaacagcattgaggagcggcgcatccaccaggagagcgagctgcactcctacctctccaggctcattgccgcggagcgtgagagggagctggaagagtgccagcgaaaccacgagggtgatgaggacgacagccacgtccgggcccagcaggcctgcattgaggccaagcacgacaagtacatggcggacatggacgagcttttttctcaggtggatgagaagaggaagaagcgagacatccccgactacctgtgtggcaagatcagctttgagctgatgcgggagccgtgcatcacgcccagtggcatcacctacgaccgcaaggacatcgaggagcacctgcagcgtgtgggtcattttgacccggtgaccaggagccccctgacccaggaacagctcatccccaacttggctatgaaggaggttattgacgcattcatctctgagaatggctgggtggaggactacggcagcggcagcccggcggcgaaacgcgtgaaactggattacccatacgatgttccagattacgcttaa

SEQ ID NO: 1366 - DNA, 906 bp, synthetic construct
  source 1..906: mol_type = other DNA; note = OMOMYC-(GS)5-CHIP-NLS-HA nucleic acid
atgtctgataccgaggaaaatgtcaagcggagaacccacaacgtgctggaaagacagagacggaatgagctgaagcgctccttcttcgccctgcgggaccagatccccgagctggaaaacaacgagaaggcccctaaggtggtgatcctgaaaaaggctacagcctacatcctgagcgtgcaggccgagacccagaaactgatcagcgagatcgacctgctgagaaagcagaacgagcagctgaagcacaagctggaacaactcagaaacagctgcgccggcagcggcagcggcagcggcagcggcagccggctgaacttcggggacgacatccccagcgctcttcgaatcgcgaagaagaagcgctggaacagcattgaggagcggcgcatccaccaggagagcgagctgcactcctacctctccaggctcattgccgcggagcgtgagagggagctggaagagtgccagcgaaaccacgagggtgatgaggacgacagccacgtccgggcccagcaggcctgcattgaggccaagcacgacaagtacatggcggacatggacgagcttttttctcaggtggatgagaagaggaagaagcgagacatccccgactacctgtgtggcaagatcagctttgagctgatgcgggagccgtgcatcacgcccagtggcatcacctacgaccgcaaggacatcgaggagcacctgcagcgtgtgggtcattttgacccggtgaccaggagccccctgacccaggaacagctcatccccaacttggctatgaaggaggttattgacgcattcatctctgagaatggctgggtggaggactacggcagcggcagcccggcggcgaaacgcgtgaaactggattacccatacgatgttccagattacgcttaa

SEQ ID NO: 1367 - DNA, 912 bp, synthetic construct
  source 1..912: mol_type = other DNA; note = OMOMYC-(GS)6-CHIP-NLS-HA nucleic acid
atgtctgataccgaggaaaatgtcaagcggagaacccacaacgtgctggaaagacagagacggaatgagctgaagcgctccttcttcgccctgcgggaccagatccccgagctggaaaacaacgagaaggcccctaaggtggtgatcctgaaaaaggctacagcctacatcctgagcgtgcaggccgagacccagaaactgatcagcgagatcgacctgctgagaaagcagaacgagcagctgaagcacaagctggaacaactcagaaacagctgcgccggcagcggcagcggcagcggcagcggcagcggcagccggctgaacttcggggacgacatccccagcgctcttcgaatcgcgaagaagaagcgctggaacagcattgaggagcggcgcatccaccaggagagcgagctgcactcctacctctccaggctcattgccgcggagcgtgagagggagctggaagagtgccagcgaaaccacgagggtgatgaggacgacagccacgtccgggcccagcaggcctgcattgaggccaagcacgacaagtacatggcggacatggacgagcttttttctcaggtggatgagaagaggaagaagcgagacatccccgactacctgtgtggcaagatcagctttgagctgatgcgggagccgtgcatcacgcccagtggcatcacctacgaccgcaaggacatcgaggagcacctgcagcgtgtgggtcattttgacccggtgaccaggagccccctgacccaggaacagctcatccccaacttggctatgaaggaggttattgacgcattcatctctgagaatggctgggtggaggactacggcagcggcagcccggcggcgaaacgcgtgaaactggattacccatacgatgttccagattacgcttaa

SEQ ID NO: 1368 - DNA, 435 bp, synthetic construct
  source 1..435: mol_type = other DNA; note = NLS-DCAF1-(GS)1-OMOMYC nucleic acid
ccggcggcgaaacgcgtgaaactggatggcagcggcagcggcagccaggcgccgattaactttaccagccgcctgaaccgccgcgcgagctttccgaaatatggcggcgtggatggcggctgctttgatcgccatctgatttttagccgcggcagctctgataccgaggaaaatgtcaagcggagaacccacaacgtgctggaaagacagagacggaatgagctgaagcgctccttcttcgccctgcgggaccagatccccgagctggaaaacaacgagaaggcccctaaggtggtgatcctgaaaaaggctacagcctacatcctgagcgtgcaggccgagacccagaaactgatcagcgagatcgacctgctgagaaagcagaacgagcagctgaagcacaagctggaacaactcagaaacagctgcgcctaa

SEQ ID NO: 1369 - DNA, 441 bp, synthetic construct
  source 1..441: mol_type = other DNA; note = NLS-DCAF1-(GS)2-OMOMYC nucleic acid
ccggcggcgaaacgcgtgaaactggatggcagcggcagcggcagccaggcgccgattaactttaccagccgcctgaaccgccgcgcgagctttccgaaatatggcggcgtggatggcggctgctttgatcgccatctgatttttagccgcggcagcggcagctctgataccgaggaaaatgtcaagcggagaacccacaacgtgctggaaagacagagacggaatgagctgaagcgctccttcttcgccctgcgggaccagatccccgagctggaaaacaacgagaaggcccctaaggtggtgatcctgaaaaaggctacagcctacatcctgagcgtgcaggccgagacccagaaactgatcagcgagatcgacctgctgagaaagcagaacgagcagctgaagcacaagctggaacaactcagaaacagctgcgcctaa

SEQ ID NO: 1370 - DNA, 447 bp, synthetic construct
  source 1..447: mol_type = other DNA; note = NLS-DCAF1-(GS)3-OMOMYC nucleic acid
ccggcggcgaaacgcgtgaaactggatggcagcggcagcggcagccaggcgccgattaactttaccagccgcctgaaccgccgcgcgagctttccgaaatatggcggcgtggatggcggctgctttgatcgccatctgatttttagccgcggcagcggcagcggcagctctgataccgaggaaaatgtcaagcggagaacccacaacgtgctggaaagacagagacggaatgagctgaagcgctccttcttcgccctgcgggaccagatccccgagctggaaaacaacgagaaggcccctaaggtggtgatcctgaaaaaggctacagcctacatcctgagcgtgcaggccgagacccagaaactgatcagcgagatcgacctgctgagaaagcagaacgagcagctgaagcacaagctggaacaactcagaaacagctgcgcctaa

SEQ ID NO: 1371 - DNA, 453 bp, synthetic construct
  source 1..453: mol_type = other DNA; note = NLS-DCAF1-(GS)4-OMOMYC nucleic acid
ccggcggcgaaacgcgtgaaactggatggcagcggcagcggcagccaggcgccgattaactttaccagccgcctgaaccgccgcgcgagctttccgaaatatggcggcgtggatggcggctgctttgatcgccatctgatttttagccgcggcagcggcagcggcagcggcagctctgataccgaggaaaatgtcaagcggagaacccacaacgtgctggaaagacagagacggaatgagctgaagcgctccttcttcgccctgcgggaccagatccccgagctggaaaacaacgagaaggcccctaaggtggtgatcctgaaaaaggctacagcctacatcctgagcgtgcaggccgagacccagaaactgatcagcgagatcgacctgctgagaaagcagaacgagcagctgaagcacaagctggaacaactcagaaacagctgcgcctaa

SEQ ID NO: 1372 - DNA, 459 bp, synthetic construct
  source 1..459: mol_type = other DNA; note = NLS-DCAF1-(GS)5-OMOMYC nucleic acid
ccggcggcgaaacgcgtgaaactggatggcagcggcagcggcagccaggcgccgattaactttaccagccgcctgaaccgccgcgcgagctttccgaaatatggcggcgtggatggcggctgctttgatcgccatctgatttttagccgcggcagcggcagcggcagcggcagcggcagctctgataccgaggaaaatgtcaagcggagaacccacaacgtgctggaaagacagagacggaatgagctgaagcgctccttcttcgccctgcgggaccagatccccgagctggaaaacaacgagaaggcccctaaggtggtgatcctgaaaaaggctacagcctacatcctgagcgtgcaggccgagacccagaaactgatcagcgagatcgacctgctgagaaagcagaacgagcagctgaagcacaagctggaacaactcagaaacagctgcgcctaa

SEQ ID NO: 1373 - DNA, 465 bp, synthetic construct
  source 1..465: mol_type = other DNA; note = NLS-DCAF1-(GS)6-OMOMYC nucleic acid
ccggcggcgaaacgcgtgaaactggatggcagcggcagcggcagccaggcgccgattaactttaccagccgcctgaaccgccgcgcgagctttccgaaatatggcggcgtggatggcggctgctttgatcgccatctgatttttagccgcggcagcggcagcggcagcggcagcggcagcggcagctctgataccgaggaaaatgtcaagcggagaacccacaacgtgctggaaagacagagacggaatgagctgaagcgctccttcttcgccctgcgggaccagatccccgagctggaaaacaacgagaaggcccctaaggtggtgatcctgaaaaaggctacagcctacatcctgagcgtgcaggccgagacccagaaactgatcagcgagatcgacctgctgagaaagcagaacgagcagctgaagcacaagctggaacaactcagaaacagctgcgcctaa

SEQ ID NO: 1374 - DNA, 465 bp, synthetic construct
  source 1..465: mol_type = other DNA; note = HA-NLS-DCAF1-(GS)1-OMOMYC nucleic acid
atgtacccatacgatgttccagattacgctccggcggcgaaacgcgtgaaactggatggcagcggcagcggcagccaggcgccgattaactttaccagccgcctgaaccgccgcgcgagctttccgaaatatggcggcgtggatggcggctgctttgatcgccatctgatttttagccgcggcagctctgataccgaggaaaatgtcaagcggagaacccacaacgtgctggaaagacagagacggaatgagctgaagcgctccttcttcgccctgcgggaccagatccccgagctggaaaacaacgagaaggcccctaaggtggtgatcctgaaaaaggctacagcctacatcctgagcgtgcaggccgagacccagaaactgatcagcgagatcgacctgctgagaaagcagaacgagcagctgaagcacaagctggaacaactcagaaacagctgcgcctaa

SEQ ID NO: 1375 - DNA, 471 bp, synthetic construct
  source 1..471: mol_type = other DNA; note = HA-NLS-DCAF1-(GS)2-OMOMYC nucleic acid
atgtacccatacgatgttccagattacgctccggcggcgaaacgcgtgaaactggatggcagcggcagcggcagccaggcgccgattaactttaccagccgcctgaaccgccgcgcgagctttccgaaatatggcggcgtggatggcggctgctttgatcgccatctgatttttagccgcggcagcggcagctctgataccgaggaaaatgtcaagcggagaacccacaacgtgctggaaagacagagacggaatgagctgaagcgctccttcttcgccctgcgggaccagatccccgagctggaaaacaacgagaaggcccctaaggtggtgatcctgaaaaaggctacagcctacatcctgagcgtgcaggccgagacccagaaactgatcagcgagatcgacctgctgagaaagcagaacgagcagctgaagcacaagctggaacaactcagaaacagctgcgcctaa

SEQ ID NO: 1376 - DNA, 477 bp, synthetic construct
  source 1..477: mol_type = other DNA; note = HA-NLS-DCAF1-(GS)3-OMOMYC nucleic acid
atgtacccatacgatgttccagattacgctccggcggcgaaacgcgtgaaactggatggcagcggcagcggcagccaggcgccgattaactttaccagccgcctgaaccgccgcgcgagctttccgaaatatggcggcgtggatggcggctgctttgatcgccatctgatttttagccgcggcagcggcagcggcagctctgataccgaggaaaatgtcaagcggagaacccacaacgtgctggaaagacagagacggaatgagctgaagcgctccttcttcgccctgcgggaccagatccccgagctggaaaacaacgagaaggcccctaaggtggtgatcctgaaaaaggctacagcctacatcctgagcgtgcaggccgagacccagaaactgatcagcgagatcgacctgctgagaaagcagaacgagcagctgaagcacaagctggaacaactcagaaacagctgcgcctaa

SEQ ID NO: 1377 - DNA, 483 bp, synthetic construct
  source 1..483: mol_type = other DNA; note = HA-NLS-DCAF1-(GS)4-OMOMYC nucleic acid
atgtacccatacgatgttccagattacgctccggcggcgaaacgcgtgaaactggatggcagcggcagcggcagccaggcgccgattaactttaccagccgcctgaaccgccgcgcgagctttccgaaatatggcggcgtggatggcggctgctttgatcgccatctgatttttagccgcggcagcggcagcggcagcggcagctctgataccgaggaaaatgtcaagcggagaacccacaacgtgctggaaagacagagacggaatgagctgaagcgctccttcttcgccctgcgggaccagatccccgagctggaaaacaacgagaaggcccctaaggtggtgatcctgaaaaaggctacagcctacatcctgagcgtgcaggccgagacccagaaactgatcagcgagatcgacctgctgagaaagcagaacgagcagctgaagcacaagctggaacaactcagaaacagctgcgcctaa

SEQ ID NO: 1378 - DNA, 489 bp, synthetic construct
  source 1..489: mol_type = other DNA; note = HA-NLS-DCAF1-(GS)5-OMOMYC nucleic acid
atgtacccatacgatgttccagattacgctccggcggcgaaacgcgtgaaactggatggcagcggcagcggcagccaggcgccgattaactttaccagccgcctgaaccgccgcgcgagctttccgaaatatggcggcgtggatggcggctgctttgatcgccatctgatttttagccgcggcagcggcagcggcagcggcagcggcagctctgataccgaggaaaatgtcaagcggagaacccacaacgtgctggaaagacagagacggaatgagctgaagcgctccttcttcgccctgcgggaccagatccccgagctggaaaacaacgagaaggcccctaaggtggtgatcctgaaaaaggctacagcctacatcctgagcgtgcaggccgagacccagaaactgatcagcgagatcgacctgctgagaaagcagaacgagcagctgaagcacaagctggaacaactcagaaacagctgcgcctaa

SEQ ID NO: 1379 - DNA, 495 bp, synthetic construct
  source 1..495: mol_type = other DNA; note = HA-NLS-DCAF1-(GS)6-OMOMYC nucleic acid
atgtacccatacgatgttccagattacgctccggcggcgaaacgcgtgaaactggatggcagcggcagcggcagccaggcgccgattaactttaccagccgcctgaaccgccgcgcgagctttccgaaatatggcggcgtggatggcggctgctttgatcgccatctgatttttagccgcggcagcggcagcggcagcggcagcggcagcggcagctctgataccgaggaaaatgtcaagcggagaacccacaacgtgctggaaagacagagacggaatgagctgaagcgctccttcttcgccctgcgggaccagatccccgagctggaaaacaacgagaaggcccctaaggtggtgatcctgaaaaaggctacagcctacatcctgagcgtgcaggccgagacccagaaactgatcagcgagatcgacctgctgagaaagcagaacgagcagctgaagcacaagctggaacaactcagaaacagctgcgcctaa

SEQ ID NO: 1380 - DNA, 1398 bp, synthetic construct
  source 1..1398: mol_type = other DNA; note = NLS-OMOMYC-(GS)1-E6AP nucleic acid
ccggcggcgaaacgcgtgaaactggatggcagcggcagcggcagctctgataccgaggaaaatgtcaagcggagaacccacaacgtgctggaaagacagagacggaatgagctgaagcgctccttcttcgccctgcgggaccagatccccgagctggaaaacaacgagaaggcccctaaggtggtgatcctgaaaaaggctacagcctacatcctgagcgtgcaggccgagacccagaaactgatcagcgagatcgacctgctgagaaagcagaacgagcagctgaagcacaagctggaacaactcagaaacagctgcgccggcagcaatccatatttgagactcaaagttagacgtgaccatatcatagatgatgcacttgtccggctagagatgatcgctatggaaaatcctgcagacttgaagaagcagttgtatgtggaatttgaaggagaacaaggagttgatgagggaggtgtttccaaagaattttttcagctggttgtggaggaaatcttcaatccagatattggtatgttcacatacgatgaatctacaaaattgttttggtttaatccatcttcttttgaaactgagggtcagtttactctgattggcatagtactgggtctggctatttacaataactgtatactggatgtacattttcccatggttgtctacaggaagctaatggggaaaaaaggaacttttcgtgacttgggagactctcacccagttctatatcagagtttaaaagatttattggagtatgaagggaatgtggaagatgacatgatgatcactttccagatatcacagacagatctttttggtaacccaatgatgtatgatctaaaggaaaatggtgataaaattccaattacaaatgaaaacaggaaggaatttgtcaatctttattctgactacattctcaataaatcagtagaaaaacagttcaaggcttttcggagaggttttcatatggtgaccaatgaatctcccttaaagtacttattcagaccagaagaaattgaattgcttatatgtggaagccggaatctagatttccaagcactagaagaaactacagaatatgacggtggctataccagggactctgttctgattagggagttctgggaaatcgttcattcatttacagatgaacagaaaagactcttcttgcagtttacaacgggcacagacagagcacctgtgggaggactaggaaaattaaagatgattatagccaaaaatggcccagacacagaaaggttacctacatctcatacttgctttaatgtgcttttacttccggaatactcaagcaaagaaaaacttaaagagagattgttgaaggccatcacgtatgccaaaggatttggcatgctgtaa

SEQ ID NO: 1381 - DNA, 1404 bp, synthetic construct
  source 1..1404: mol_type = other DNA; note = NLS-OMOMYC-(GS)2-E6AP nucleic acid
ccggcggcgaaacgcgtgaaactggatggcagcggcagcggcagctctgataccgaggaaaatgtcaagcggagaacccacaacgtgctggaaagacagagacggaatgagctgaagcgctccttcttcgccctgcgggaccagatccccgagctggaaaacaacgagaaggcccctaaggtggtgatcctgaaaaaggctacagcctacatcctgagcgtgcaggccgagacccagaaactgatcagcgagatcgacctgctgagaaagcagaacgagcagctgaagcacaagctggaacaactcagaaacagctgcgccggcagcggcagcaatccatatttgagactcaaagttagacgtgaccatatcatagatgatgcacttgtccggctagagatgatcgctatggaaaatcctgcagacttgaagaagcagttgtatgtggaatttgaaggagaacaaggagttgatgagggaggtgtttccaaagaattttttcagctggttgtggaggaaatcttcaatccagatattggtatgttcacatacgatgaatctacaaaattgttttggtttaatccatcttcttttgaaactgagggtcagtttactctgattggcatagtactgggtctggctatttacaataactgtatactggatgtacattttcccatggttgtctacaggaagctaatggggaaaaaaggaacttttcgtgacttgggagactctcacccagttctatatcagagtttaaaagatttattggagtatgaagggaatgtggaagatgacatgatgatcactttccagatatcacagacagatctttttggtaacccaatgatgtatgatctaaaggaaaatggtgataaaattccaattacaaatgaaaacaggaaggaatttgtcaatctttattctgactacattctcaataaatcagtagaaaaacagttcaaggcttttcggagaggttttcatatggtgaccaatgaatctcccttaaagtacttattcagaccagaagaaattgaattgcttatatgtggaagccggaatctagatttccaagcactagaagaaactacagaatatgacggtggctataccagggactctgttctgattagggagttctgggaaatcgttcattcatttacagatgaacagaaaagactcttcttgcagtttacaacgggcacagacagagcacctgtgggaggactaggaaaattaaagatgattatagccaaaaatggcccagacacagaaaggttacctacatctcatacttgctttaatgtgcttttacttccggaatactcaagcaaagaaaaacttaaagagagattgttgaaggccatcacgtatgccaaaggatttggcatgctgtaa

SEQ ID NO: 1382 - DNA, 1410 bp, synthetic construct
  source 1..1410: mol_type = other DNA; note = NLS-OMOMYC-(GS)3-E6AP nucleic acid
ccggcggcgaaacgcgtgaaactggatggcagcggcagcggcagctctgataccgaggaaaatgtcaagcggagaacccacaacgtgctggaaagacagagacggaatgagctgaagcgctccttcttcgccctgcgggaccagatccccgagctggaaaacaacgagaaggcccctaaggtggtgatcctgaaaaaggctacagcctacatcctgagcgtgcaggccgagacccagaaactgatcagcgagatcgacctgctgagaaagcagaacgagcagctgaagcacaagctggaacaactcagaaacagctgcgccggcagcggcagcggcagcaatccatatttgagactcaaagttagacgtgaccatatcatagatgatgcacttgtccggctagagatgatcgctatggaaaatcctgcagacttgaagaagcagttgtatgtggaatttgaaggagaacaaggagttgatgagggaggtgtttccaaagaattttttcagctggttgtggaggaaatcttcaatccagatattggtatgttcacatacgatgaatctacaaaattgttttggtttaatccatcttcttttgaaactgagggtcagtttactctgattggcatagtactgggtctggctatttacaataactgtatactggatgtacattttcccatggttgtctacaggaagctaatggggaaaaaaggaacttttcgtgacttgggagactctcacccagttctatatcagagtttaaaagatttattggagtatgaagggaatgtggaagatgacatgatgatcactttccagatatcacagacagatctttttggtaacccaatgatgtatgatctaaaggaaaatggtgataaaattccaattacaaatgaaaacaggaaggaatttgtcaatctttattctgactacattctcaataaatcagtagaaaaacagttcaaggcttttcggagaggttttcatatggtgaccaatgaatctcccttaaagtacttattcagaccagaagaaattgaattgcttatatgtggaagccggaatctagatttccaagcactagaagaaactacagaatatgacggtggctataccagggactctgttctgattagggagttctgggaaatcgttcattcatttacagatgaacagaaaagactcttcttgcagtttacaacgggcacagacagagcacctgtgggaggactaggaaaattaaagatgattatagccaaaaatggcccagacacagaaaggttacctacatctcatacttgctttaatgtgcttttacttccggaatactcaagcaaagaaaaacttaaagagagattgttgaaggccatcacgtatgccaaaggatttggcatgctgtaa

SEQ ID NO: 1383 - DNA, 1416 bp, synthetic construct
  source 1..1416: mol_type = other DNA; note = NLS-OMOMYC-(GS)4-E6AP nucleic acid
ccggcggcgaaacgcgtgaaactggatggcagcggcagcggcagctctgataccgaggaaaatgtcaagcggagaacccacaacgtgctggaaagacagagacggaatgagctgaagcgctccttcttcgccctgcgggaccagatccccgagctggaaaacaacgagaaggcccctaaggtggtgatcctgaaaaaggctacagcctacatcctgagcgtgcaggccgagacccagaaactgatcagcgagatcgacctgctgagaaagcagaacgagcagctgaagcacaagctggaacaactcagaaacagctgcgccggcagcggcagcggcagcggcagcaatccatatttgagactcaaagttagacgtgaccatatcatagatgatgcacttgtccggctagagatgatcgctatggaaaatcctgcagacttgaagaagcagttgtatgtggaatttgaaggagaacaaggagttgatgagggaggtgtttccaaagaattttttcagctggttgtggaggaaatcttcaatccagatattggtatgttcacatacgatgaatctacaaaattgttttggtttaatccatcttcttttgaaactgagggtcagtttactctgattggcatagtactgggtctggctatttacaataactgtatactggatgtacattttcccatggttgtctacaggaagctaatggggaaaaaaggaacttttcgtgacttgggagactctcacccagttctatatcagagtttaaaagatttattggagtatgaagggaatgtggaagatgacatgatgatcactttccagatatcacagacagatctttttggtaacccaatgatgtatgatctaaaggaaaatggtgataaaattccaattacaaatgaaaacaggaaggaatttgtcaatctttattctgactacattctcaataaatcagtagaaaaacagttcaaggcttttcggagaggttttcatatggtgaccaatgaatctcccttaaagtacttattcagaccagaagaaattgaattgcttatatgtggaagccggaatctagatttccaagcactagaagaaactacagaatatgacggtggctataccagggactctgttctgattagggagttctgggaaatcgttcattcatttacagatgaacagaaaagactcttcttgcagtttacaacgggcacagacagagcacctgtgggaggactaggaaaattaaagatgattatagccaaaaatggcccagacacagaaaggttacctacatctcatacttgctttaatgtgcttttacttccggaatactcaagcaaagaaaaacttaaagagagattgttgaaggccatcacgtatgccaaaggatttggcatgctgtaa

SEQ ID NO: 1384 - DNA, 1422 bp, synthetic construct
  source 1..1422: mol_type = other DNA; note = NLS-OMOMYC-(GS)5-E6AP nucleic acid
ccggcggcgaaacgcgtgaaactggatggcagcggcagcggcagctctgataccgaggaaaatgtcaagcggagaacccacaacgtgctggaaagacagagacggaatgagctgaagcgctccttcttcgccctgcgggaccagatccccgagctggaaaacaacgagaaggcccctaaggtggtgatcctgaaaaaggctacagcctacatcctgagcgtgcaggccgagacccagaaactgatcagcgagatcgacctgctgagaaagcagaacgagcagctgaagcacaagctggaacaactcagaaacagctgcgccggcagcggcagcggcagcggcagcggcagcaatccatatttgagactcaaagttagacgtgaccatatcatagatgatgcacttgtccggctagagatgatcgctatggaaaatcctgcagacttgaagaagcagttgtatgtggaatttgaaggagaacaaggagttgatgagggaggtgtttccaaagaattttttcagctggttgtggaggaaatcttcaatccagatattggtatgttcacatacgatgaatctacaaaattgttttggtttaatccatcttcttttgaaactgagggtcagtttactctgattggcatagtactgggtctggctatttacaataactgtatactggatgtacattttcccatggttgtctacaggaagctaatggggaaaaaaggaacttttcgtgacttgggagactctcacccagttctatatcagagtttaaaagatttattggagtatgaagggaatgtggaagatgacatgatgatcactttccagatatcacagacagatctttttggtaacccaatgatgtatgatctaaaggaaaatggtgataaaattccaattacaaatgaaaacaggaaggaatttgtcaatctttattctgactacattctcaataaatcagtagaaaaacagttcaaggcttttcggagaggttttcatatggtgaccaatgaatctcccttaaagtacttattcagaccagaagaaattgaattgcttatatgtggaagccggaatctagatttccaagcactagaagaaactacagaatatgacggtggctataccagggactctgttctgattagggagttctgggaaatcgttcattcatttacagatgaacagaaaagactcttcttgcagtttacaacgggcacagacagagcacctgtgggaggactaggaaaattaaagatgattatagccaaaaatggcccagacacagaaaggttacctacatctcatacttgctttaatgtgcttttacttccggaatactcaagcaaagaaaaacttaaagagagattgttgaaggccatcacgtatgccaaaggatttggcatgctgtaa

SEQ ID NO: 1385 - DNA, 1428 bp, synthetic construct
  source 1..1428: mol_type = other DNA; note = NLS-OMOMYC-(GS)6-E6AP nucleic acid
ccggcggcgaaacgcgtgaaactggatggcagcggcagcggcagctctgataccgaggaaaatgtcaagcggagaacccacaacgtgctggaaagacagagacggaatgagctgaagcgctccttcttcgccctgcgggaccagatccccgagctggaaaacaacgagaaggcccctaaggtggtgatcctgaaaaaggctacagcctacatcctgagcgtgcaggccgagacccagaaactgatcagcgagatcgacctgctgagaaagcagaacgagcagctgaagcacaagctggaacaactcagaaacagctgcgccggcagcggcagcggcagcggcagcggcagcggcagcaatccatatttgagactcaaagttagacgtgaccatatcatagatgatgcacttgtccggctagagatgatcgctatggaaaatcctgcagacttgaagaagcagttgtatgtggaatttgaaggagaacaaggagttgatgagggaggtgtttccaaagaattttttcagctggttgtggaggaaatcttcaatccagatattggtatgttcacatacgatgaatctacaaaattgttttggtttaatccatcttcttttgaaactgagggtcagtttactctgattggcatagtactgggtctggctatttacaataactgtatactggatgtacattttcccatggttgtctacaggaagctaatggggaaaaaaggaacttttcgtgacttgggagactctcacccagttctatatcagagtttaaaagatttattggagtatgaagggaatgtggaagatgacatgatgatcactttccagatatcacagacagatctttttggtaacccaatgatgtatgatctaaaggaaaatggtgataaaattccaattacaaatgaaaacaggaaggaatttgtcaatctttattctgactacattctcaataaatcagtagaaaaacagttcaaggcttttcggagaggttttcatatggtgaccaatgaatctcccttaaagtacttattcagaccagaagaaattgaattgcttatatgtggaagccggaatctagatttccaagcactagaagaaactacagaatatgacggtggctataccagggactctgttctgattagggagttctgggaaatcgttcattcatttacagatgaacagaaaagactcttcttgcagtttacaacgggcacagacagagcacctgtgggaggactaggaaaattaaagatgattatagccaaaaatggcccagacacagaaaggttacctacatctcatacttgctttaatgtgcttttacttccggaatactcaagcaaagaaaaacttaaagagagattgttgaaggccatcacgtatgccaaaggatttggcatgctgtaa

SEQ ID NO: 1386 - DNA, 1428 bp, synthetic construct
  source 1..1428: mol_type = other DNA; note = HA-NLS-OMOMYC-(GS)1-E6AP nucleic acid
atgtacccatacgatgttccagattacgctccggcggcgaaacgcgtgaaactggatggcagcggcagcggcagctctgataccgaggaaaatgtcaagcggagaacccacaacgtgctggaaagacagagacggaatgagctgaagcgctccttcttcgccctgcgggaccagatccccgagctggaaaacaacgagaaggcccctaaggtggtgatcctgaaaaaggctacagcctacatcctgagcgtgcaggccgagacccagaaactgatcagcgagatcgacctgctgagaaagcagaacgagcagctgaagcacaagctggaacaactcagaaacagctgcgccggcagcaatccatatttgagactcaaagttagacgtgaccatatcatagatgatgcacttgtccggctagagatgatcgctatggaaaatcctgcagacttgaagaagcagttgtatgtggaatttgaaggagaacaaggagttgatgagggaggtgtttccaaagaattttttcagctggttgtggaggaaatcttcaatccagatattggtatgttcacatacgatgaatctacaaaattgttttggtttaatccatcttcttttgaaactgagggtcagtttactctgattggcatagtactgggtctggctatttacaataactgtatactggatgtacattttcccatggttgtctacaggaagctaatggggaaaaaaggaacttttcgtgacttgggagactctcacccagttctatatcagagtttaaaagatttattggagtatgaagggaatgtggaagatgacatgatgatcactttccagatatcacagacagatctttttggtaacccaatgatgtatgatctaaaggaaaatggtgataaaattccaattacaaatgaaaacaggaaggaatttgtcaatctttattctgactacattctcaataaatcagtagaaaaacagttcaaggcttttcggagaggttttcatatggtgaccaatgaatctcccttaaagtacttattcagaccagaagaaattgaattgcttatatgtggaagccggaatctagatttccaagcactagaagaaactacagaatatgacggtggctataccagggactctgttctgattagggagttctgggaaatcgttcattcatttacagatgaacagaaaagactcttcttgcagtttacaacgggcacagacagagcacctgtgggaggactaggaaaattaaagatgattatagccaaaaatggcccagacacagaaaggttacctacatctcatacttgctttaatgtgcttttacttccggaatactcaagcaaagaaaaacttaaagagagattgttgaaggccatcacgtatgccaaaggatttggcatgctgtaa

SEQ ID NO: 1387 - DNA, 1434 bp, synthetic construct
  source 1..1434: mol_type = other DNA; note = HA-NLS-OMOMYC-(GS)2-E6AP nucleic acid
atgtacccatacgatgttccagattacgctccggcggcgaaacgcgtgaaactggatggcagcggcagcggcagctctgataccgaggaaaatgtcaagcggagaacccacaacgtgctggaaagacagagacggaatgagctgaagcgctccttcttcgccctgcgggaccagatccccgagctggaaaacaacgagaaggcccctaaggtggtgatcctgaaaaaggctacagcctacatcctgagcgtgcaggccgagacccagaaactgatcagcgagatcgacctgctgagaaagcagaacgagcagctgaagcacaagctggaacaactcagaaacagctgcgccggcagcggcagcaatccatatttgagactcaaagttagacgtgaccatatcatagatgatgcacttgtccggctagagatgatcgctatggaaaatcctgcagacttgaagaagcagttgtatgtggaatttgaaggagaacaaggagttgatgagggaggtgtttccaaagaattttttcagctggttgtggaggaaatcttcaatccagatattggtatgttcacatacgatgaatctacaaaattgttttggtttaatccatcttcttttgaaactgagggtcagtttactctgattggcatagtactgggtctggctatttacaataactgtatactggatgtacattttcccatggttgtctacaggaagctaatggggaaaaaaggaacttttcgtgacttgggagactctcacccagttctatatcagagtttaaaagatttattggagtatgaagggaatgtggaagatgacatgatgatcactttccagatatcacagacagatctttttggtaacccaatgatgtatgatctaaaggaaaatggtgataaaattccaattacaaatgaaaacaggaaggaatttgtcaatctttattctgactacattctcaataaatcagtagaaaaacagttcaaggcttttcggagaggttttcatatggtgaccaatgaatctcccttaaagtacttattcagaccagaagaaattgaattgcttatatgtggaagccggaatctagatttccaagcactagaagaaactacagaatatgacggtggctataccagggactctgttctgattagggagttctgggaaatcgttcattcatttacagatgaacagaaaagactcttcttgcagtttacaacgggcacagacagagcacctgtgggaggactaggaaaattaaagatgattatagccaaaaatggcccagacacagaaaggttacctacatctcatacttgctttaatgtgcttttacttccggaatactcaagcaaagaaaaacttaaagagagattgttgaaggccatcacgtatgccaaaggatttggcatgctgtaa

SEQ ID NO: 1388 - DNA, 1440 bp, synthetic construct
  source 1..1440: mol_type = other DNA; note = HA-NLS-OMOMYC-(GS)3-E6AP nucleic acid
atgtacccatacgatgttccagattacgctccggcggcgaaacgcgtgaaactggatggcagcggcagcggcagctctgataccgaggaaaatgtcaagcggagaacccacaacgtgctggaaagacagagacggaatgagctgaagcgctccttcttcgccctgcgggaccagatccccgagctggaaaacaacgagaaggcccctaaggtggtgatcctgaaaaaggctacagcctacatcctgagcgtgcaggccgagacccagaaactgatcagcgagatcgacctgctgagaaagcagaacgagcagctgaagcacaagctggaacaactcagaaacagctgcgccggcagcggcagcggcagcaatccatatttgagactcaaagttagacgtgaccatatcatagatgatgcacttgtccggctagagatgatcgctatggaaaatcctgcagacttgaagaagcagttgtatgtggaatttgaaggagaacaaggagttgatgagggaggtgtttccaaagaattttttcagctggttgtggaggaaatcttcaatccagatattggtatgttcacatacgatgaatctacaaaattgttttggtttaatccatcttcttttgaaactgagggtcagtttactctgattggcatagtactgggtctggctatttacaataactgtatactggatgtacattttcccatggttgtctacaggaagctaatggggaaaaaaggaacttttcgtgacttgggagactctcacccagttctatatcagagtttaaaagatttattggagtatgaagggaatgtggaagatgacatgatgatcactttccagatatcacagacagatctttttggtaacccaatgatgtatgatctaaaggaaaatggtgataaaattccaattacaaatgaaaacaggaaggaatttgtcaatctttattctgactacattctcaataaatcagtagaaaaacagttcaaggcttttcggagaggttttcatatggtgaccaatgaatctcccttaaagtacttattcagaccagaagaaattgaattgcttatatgtggaagccggaatctagatttccaagcactagaagaaactacagaatatgacggtggctataccagggactctgttctgattagggagttctgggaaatcgttcattcatttacagatgaacagaaaagactcttcttgcagtttacaacgggcacagacagagcacctgtgggaggactaggaaaattaaagatgattatagccaaaaatggcccagacacagaaaggttacctacatctcatacttgctttaatgtgcttttacttccggaatactcaagcaaagaaaaacttaaagagagattgttgaaggccatcacgtatgccaaaggatttggcatgctgtaa

SEQ ID NO: 1389 - DNA, 1446 bp, synthetic construct
  source 1..1446: mol_type = other DNA; note = HA-NLS-OMOMYC-(GS)4-E6AP nucleic acid
atgtacccatacgatgttccagattacgctccggcggcgaaacgcgtgaaactggatggcagcggcagcggcagctctgataccgaggaaaatgtcaagcggagaacccacaacgtgctggaaagacagagacggaatgagctgaagcgctccttcttcgccctgcgggaccagatccccgagctggaaaacaacgagaaggcccctaaggtggtgatcctgaaaaaggctacagcctacatcctgagcgtgcaggccgagacccagaaactgatcagcgagatcgacctgctgagaaagcagaacgagcagctgaagcacaagctggaacaactcagaaacagctgcgccggcagcggcagcggcagcggcagcaatccatatttgagactcaaagttagacgtgaccatatcatagatgatgcacttgtccggctagagatgatcgctatggaaaatcctgcagacttgaagaagcagttgtatgtggaatttgaaggagaacaaggagttgatgagggaggtgtttccaaagaattttttcagctggttgtggaggaaatcttcaatccagatattggtatgttcacatacgatgaatctacaaaattgttttggtttaatccatcttcttttgaaactgagggtcagtttactctgattggcatagtactgggtctggctatttacaataactgtatactggatgtacattttcccatggttgtctacaggaagctaatggggaaaaaaggaacttttcgtgacttgggagactctcacccagttctatatcagagtttaaaagatttattggagtatgaagggaatgtggaagatgacatgatgatcactttccagatatcacagacagatctttttggtaacccaatgatgtatgatctaaaggaaaatggtgataaaattccaattacaaatgaaaacaggaaggaatttgtcaatctttattctgactacattctcaataaatcagtagaaaaacagttcaaggcttttcggagaggttttcatatggtgaccaatgaatctcccttaaagtacttattcagaccagaagaaattgaattgcttatatgtggaagccggaatctagatttccaagcactagaagaaactacagaatatgacggtggctataccagggactctgttctgattagggagttctgggaaatcgttcattcatttacagatgaacagaaaagactcttcttgcagtttacaacgggcacagacagagcacctgtgggaggactaggaaaattaaagatgattatagccaaaaatggcccagacacagaaaggttacctacatctcatacttgctttaatgtgcttttacttccggaatactcaagcaaagaaaaacttaaagagagattgttgaaggccatcacgtatgccaaaggatttggcatgctgtaa

SEQ ID NO: 1390 - DNA, 1452 bp, synthetic construct
  source 1..1452: mol_type = other DNA; note = HA-NLS-OMOMYC-(GS)5-E6AP nucleic acid
atgtacccatacgatgttccagattacgctccggcggcgaaacgcgtgaaactggatggcagcggcagcggcagctctgataccgaggaaaatgtcaagcggagaacccacaacgtgctggaaagacagagacggaatgagctgaagcgctccttcttcgccctgcgggaccagatccccgagctggaaaacaacgagaaggcccctaaggtggtgatcctgaaaaaggctacagcctacatcctgagcgtgcaggccgagacccagaaactgatcagcgagatcgacctgctgagaaagcagaacgagcagctgaagcacaagctggaacaactcagaaacagctgcgccggcagcggcagcggcagcggcagcggcagcaatccatatttgagactcaaagttagacgtgaccatatcatagatgatgcacttgtccggctagagatgatcgctatggaaaatcctgcagacttgaagaagcagttgtatgtggaatttgaaggagaacaaggagttgatgagggaggtgtttccaaagaattttttcagctggttgtggaggaaatcttcaatccagatattggtatgttcacatacgatgaatctacaaaattgttttggtttaatccatcttcttttgaaactgagggtcagtttactctgattggcatagtactgggtctggctatttacaataactgtatactggatgtacattttcccatggttgtctacaggaagctaatggggaaaaaaggaacttttcgtgacttgggagactctcacccagttctatatcagagtttaaaagatttattggagtatgaagggaatgtggaagatgacatgatgatcactttccagatatcacagacagatctttttggtaacccaatgatgtatgatctaaaggaaaatggtgataaaattccaattacaaatgaaaacaggaaggaatttgtcaatctttattctgactacattctcaataaatcagtagaaaaacagttcaaggcttttcggagaggttttcatatggtgaccaatgaatctcccttaaagtacttattcagaccagaagaaattgaattgcttatatgtggaagccggaatctagatttccaagcactagaagaaactacagaatatgacggtggctataccagggactctgttctgattagggagttctgggaaatcgttcattcatttacagatgaacagaaaagactcttcttgcagtttacaacgggcacagacagagcacctgtgggaggactaggaaaattaaagatgattatagccaaaaatggcccagacacagaaaggttacctacatctcatacttgctttaatgtgcttttacttccggaatactcaagcaaagaaaaacttaaagagagattgttgaaggccatcacgtatgccaaaggatttggcatgctgtaa

SEQ ID NO: 1391 - DNA, 1458 bp, synthetic construct
  source 1..1458: mol_type = other DNA; note = HA-NLS-OMOMYC-(GS)6-E6AP nucleic acid
atgtacccatacgatgttccagattacgctccggcggcgaaacgcgtgaaactggatggcagcggcagcggcagctctgataccgaggaaaatgtcaagcggagaacccacaacgtgctggaaagacagagacggaatgagctgaagcgctccttcttcgccctgcgggaccagatccccgagctggaaaacaacgagaaggcccctaaggtggtgatcctgaaaaaggctacagcctacatcctgagcgtgcaggccgagacccagaaactgatcagcgagatcgacctgctgagaaagcagaacgagcagctgaagcacaagctggaacaactcagaaacagctgcgccggcagcggcagcggcagcggcagcggcagcggcagcaatccatatttgagactcaaagttagacgtgaccatatcatagatgatgcacttgtccggctagagatgatcgctatggaaaatcctgcagacttgaagaagcagttgtatgtggaatttgaaggagaacaaggagttgatgagggaggtgtttccaaagaattttttcagctggttgtggaggaaatcttcaatccagatattggtatgttcacatacgatgaatctacaaaattgttttggtttaatccatcttcttttgaaactgagggtcagtttactctgattggcatagtactgggtctggctatttacaataactgtatactggatgtacattttcccatggttgtctacaggaagctaatggggaaaaaaggaacttttcgtgacttgggagactctcacccagttctatatcagagtttaaaagatttattggagtatgaagggaatgtggaagatgacatgatgatcactttccagatatcacagacagatctttttggtaacccaatgatgtatgatctaaaggaaaatggtgataaaattccaattacaaatgaaaacaggaaggaatttgtcaatctttattctgactacattctcaataaatcagtagaaaaacagttcaaggcttttcggagaggttttcatatggtgaccaatgaatctcccttaaagtacttattcagaccagaagaaattgaattgcttatatgtggaagccggaatctagatttccaagcactagaagaaactacagaatatgacggtggctataccagggactctgttctgattagggagttctgggaaatcgttcattcatttacagatgaacagaaaagactcttcttgcagtttacaacgggcacagacagagcacctgtgggaggactaggaaaattaaagatgattatagccaaaaatggcccagacacagaaaggttacctacatctcatacttgctttaatgtgcttttacttccggaatactcaagcaaagaaaaacttaaagagagattgttgaaggccatcacgtatgccaaaggatttggcatgctgtaa

SEQ ID NO: 1392 - DNA, 1386 bp, synthetic construct
  source 1..1386: mol_type = other DNA; note = FBXW7a-(GS)1-OMOMYC nucleic acid
aatcaggaactgctctctgtgggcagcaaaagacgacgaactggaggctctctgagaggtaacccttcctcaagccaggtagatgaagaacagatgaatcgtgtggtagaggaggaacagcaacagcaactcagacaacaagaggaggagcacactgcaaggaatggtgaagttgttggagtagaacctagacctggaggccaaaatgattcccagcaaggacagttggaagaaaacaataatagatttatttcggtagatgaggactcctcaggaaaccaagaagaacaagaggaagatgaagaacatgctggtgaacaagatgaggaggatgaggaggaggaggagatggaccaggagagtgacgattttgatcagtctgatgatagtagcagagaagatgaacatacacatactaacagtgtcacgaactccagtagtattgtggacctgcccgttcaccaactctcctccccattctatacaaaaacaacaaaaatgaaaagaaagttggaccatggttctgaggtccgctctttttctttgggaaagaaaccatgcaaagtctcagaatatacaagtaccactgggcttgtaccatgttcagcaacaccaacaacttttggggacctcagagcagccaatggccaagggcaacaacgacgccgaattacatctgtccagccacctacaggcctccaggaatggctaaaaatgtttcagagctggagtggaccagagaaattgcttgctttagatgaactcattgatagttgtgaaccaacacaagtaaaacatatgatgcaagtgatagaaccccagtttcaacgagacttcatttcattgctccctaaagagttggcactctatgtgctttcattcctggaacccaaagacctgctacaagcagctcagacatgtcgctactggagaattttggctgaagacaaccttctctggagagagaaatgcaaagaagaggggattgatgaaccattgcacatcaagagaagaaaagtaataaaaccaggtttcatacacagtccatggaaaagtgcatacatcagacagcacagaattgatactaactcgaggcgaggaggcagctctgataccgaggaaaatgtcaagcggagaacccacaacgtgctggaaagacagagacggaatgagctgaagcgctccttcttcgccctgcgggaccagatccccgagctggaaaacaacgagaaggcccctaaggtggtgatcctgaaaaaggctacagcctacatcctgagcgtgcaggccgagacccagaaactgatcagcgagatcgacctgctgagaaagcagaacgagcagctgaagcacaagctggaacaactcagaaacagctgcgcctaa

SEQ ID NO: 1393 - DNA, 1392 bp, synthetic construct
  source 1..1392: mol_type = other DNA; note = FBXW7a-(GS)2-OMOMYC nucleic acid
aatcaggaactgctctctgtgggcagcaaaagacgacgaactggaggctctctgagaggtaacccttcctcaagccaggtagatgaagaacagatgaatcgtgtggtagaggaggaacagcaacagcaactcagacaacaagaggaggagcacactgcaaggaatggtgaagttgttggagtagaacctagacctggaggccaaaatgattcccagcaaggacagttggaagaaaacaataatagatttatttcggtagatgaggactcctcaggaaaccaagaagaacaagaggaagatgaagaacatgctggtgaacaagatgaggaggatgaggaggaggaggagatggaccaggagagtgacgattttgatcagtctgatgatagtagcagagaagatgaacatacacatactaacagtgtcacgaactccagtagtattgtggacctgcccgttcaccaactctcctccccattctatacaaaaacaacaaaaatgaaaagaaagttggaccatggttctgaggtccgctctttttctttgggaaagaaaccatgcaaagtctcagaatatacaagtaccactgggcttgtaccatgttcagcaacaccaacaacttttggggacctcagagcagccaatggccaagggcaacaacgacgccgaattacatctgtccagccacctacaggcctccaggaatggctaaaaatgtttcagagctggagtggaccagagaaattgcttgctttagatgaactcattgatagttgtgaaccaacacaagtaaaacatatgatgcaagtgatagaaccccagtttcaacgagacttcatttcattgctccctaaagagttggcactctatgtgctttcattcctggaacccaaagacctgctacaagcagctcagacatgtcgctactggagaattttggctgaagacaaccttctctggagagagaaatgcaaagaagaggggattgatgaaccattgcacatcaagagaagaaaagtaataaaaccaggtttcatacacagtccatggaaaagtgcatacatcagacagcacagaattgatactaactcgaggcgaggaggcagcggcagctctgataccgaggaaaatgtcaagcggagaacccacaacgtgctggaaagacagagacggaatgagctgaagcgctccttcttcgccctgcgggaccagatccccgagctggaaaacaacgagaaggcccctaaggtggtgatcctgaaaaaggctacagcctacatcctgagcgtgcaggccgagacccagaaactgatcagcgagatcgacctgctgagaaagcagaacgagcagctgaagcacaagctggaacaactcagaaacagctgcgcctaa

SEQ ID NO: 1394 - DNA, 1398 bp, synthetic construct
  source 1..1398: mol_type = other DNA; note = FBXW7a-(GS)3-OMOMYC nucleic acid
aatcaggaactgctctctgtgggcagcaaaagacgacgaactggaggctctctgagaggtaacccttcctcaagccaggtagatgaagaacagatgaatcgtgtggtagaggaggaacagcaacagcaactcagacaacaagaggaggagcacactgcaaggaatggtgaagttgttggagtagaacctagacctggaggccaaaatgattcccagcaaggacagttggaagaaaacaataatagatttatttcggtagatgaggactcctcaggaaaccaagaagaacaagaggaagatgaagaacatgctggtgaacaagatgaggaggatgaggaggaggaggagatggaccaggagagtgacgattttgatcagtctgatgatagtagcagagaagatgaacatacacatactaacagtgtcacgaactccagtagtattgtggacctgcccgttcaccaactctcctccccattctatacaaaaacaacaaaaatgaaaagaaagttggaccatggttctgaggtccgctctttttctttgggaaagaaaccatgcaaagtctcagaatatacaagtaccactgggcttgtaccatgttcagcaacaccaacaacttttggggacctcagagcagccaatggccaagggcaacaacgacgccgaattacatctgtccagccacctacaggcctccaggaatggctaaaaatgtttcagagctggagtggaccagagaaattgcttgctttagatgaactcattgatagttgtgaaccaacacaagtaaaacatatgatgcaagtgatagaaccccagtttcaacgagacttcatttcattgctccctaaagagttggcactctatgtgctttcattcctggaacccaaagacctgctacaagcagctcagacatgtcgctactggagaattttggctgaagacaaccttctctggagagagaaatgcaaagaagaggggattgatgaaccattgcacatcaagagaagaaaagtaataaaaccaggtttcatacacagtccatggaaaagtgcatacatcagacagcacagaattgatactaactcgaggcgaggaggcagcggcagcggcagctctgataccgaggaaaatgtcaagcggagaacccacaacgtgctggaaagacagagacggaatgagctgaagcgctccttcttcgccctgcgggaccagatccccgagctggaaaacaacgagaaggcccctaaggtggtgatcctgaaaaaggctacagcctacatcctgagcgtgcaggccgagacccagaaactgatcagcgagatcgacctgctgagaaagcagaacgagcagctgaagcacaagctggaacaactcagaaacagctgcgcctaa

SEQ ID NO: 1395 - DNA, 1404 bp, synthetic construct
  source 1..1404: mol_type = other DNA; note = FBXW7a-(GS)4-OMOMYC nucleic acid
aatcaggaactgctctctgtgggcagcaaaagacgacgaactggaggctctctgagaggtaacccttcctcaagccaggtagatgaagaacagatgaatcgtgtggtagaggaggaacagcaacagcaactcagacaacaagaggaggagcacactgcaaggaatggtgaagttgttggagtagaacctagacctggaggccaaaatgattcccagcaaggacagttggaagaaaacaataatagatttatttcggtagatgaggactcctcaggaaaccaagaagaacaagaggaagatgaagaacatgctggtgaacaagatgaggaggatgaggaggaggaggagatggaccaggagagtgacgattttgatcagtctgatgatagtagcagagaagatgaacatacacatactaacagtgtcacgaactccagtagtattgtggacctgcccgttcaccaactctcctccccattctatacaaaaacaacaaaaatgaaaagaaagttggaccatggttctgaggtccgctctttttctttgggaaagaaaccatgcaaagtctcagaatatacaagtaccactgggcttgtaccatgttcagcaacaccaacaacttttggggacctcagagcagccaatggccaagggcaacaacgacgccgaattacatctgtccagccacctacaggcctccaggaatggctaaaaatgtttcagagctggagtggaccagagaaattgcttgctttagatgaactcattgatagttgtgaaccaacacaagtaaaacatatgatgcaagtgatagaaccccagtttcaacgagacttcatttcattgctccctaaagagttggcactctatgtgctttcattcctggaacccaaagacctgctacaagcagctcagacatgtcgctactggagaattttggctgaagacaaccttctctggagagagaaatgcaaagaagaggggattgatgaaccattgcacatcaagagaagaaaagtaataaaaccaggtttcatacacagtccatggaaaagtgcatacatcagacagcacagaattgatactaactcgaggcgaggaggcagcggcagcggcagcggcagctctgataccgaggaaaatgtcaagcggagaacccacaacgtgctggaaagacagagacggaatgagctgaagcgctccttcttcgccctgcgggaccagatccccgagctggaaaacaacgagaaggcccctaaggtggtgatcctgaaaaaggctacagcctacatcctgagcgtgcaggccgagacccagaaactgatcagcgagatcgacctgctgagaaagcagaacgagcagctgaagcacaagctggaacaactcagaaacagctgcgcctaa

SEQ ID NO: 1396 - DNA, 1410 bp, synthetic construct
  source 1..1410: mol_type = other DNA; note = FBXW7a-(GS)5-OMOMYC nucleic acid
aatcaggaactgctctctgtgggcagcaaaagacgacgaactggaggctctctgagaggtaacccttcctcaagccaggtagatgaagaacagatgaatcgtgtggtagaggaggaacagcaacagcaactcagacaacaagaggaggagcacactgcaaggaatggtgaagttgttggagtagaacctagacctggaggccaaaatgattcccagcaaggacagttggaagaaaacaataatagatttatttcggtagatgaggactcctcaggaaaccaagaagaacaagaggaagatgaagaacatgctggtgaacaagatgaggaggatgaggaggaggaggagatggaccaggagagtgacgattttgatcagtctgatgatagtagcagagaagatgaacatacacatactaacagtgtcacgaactccagtagtattgtggacctgcccgttcaccaactctcctccccattctatacaaaaacaacaaaaatgaaaagaaagttggaccatggttctgaggtccgctctttttctttgggaaagaaaccatgcaaagtctcagaatatacaagtaccactgggcttgtaccatgttcagcaacaccaacaacttttggggacctcagagcagccaatggccaagggcaacaacgacgccgaattacatctgtccagccacctacaggcctccaggaatggctaaaaatgtttcagagctggagtggaccagagaaattgcttgctttagatgaactcattgatagttgtgaaccaacacaagtaaaacatatgatgcaagtgatagaaccccagtttcaacgagacttcatttcattgctccctaaagagttggcactctatgtgctttcattcctggaacccaaagacctgctacaagcagctcagacatgtcgctactggagaattttggctgaagacaaccttctctggagagagaaatgcaaagaagaggggattgatgaaccattgcacatcaagagaagaaaagtaataaaaccaggtttcatacacagtccatggaaaagtgcatacatcagacagcacagaattgatactaactcgaggcgaggaggcagcggcagcggcagcggcagcggcagctctgataccgaggaaaatgtcaagcggagaacccacaacgtgctggaaagacagagacggaatgagctgaagcgctccttcttcgccctgcgggaccagatccccgagctggaaaacaacgagaaggcccctaaggtggtgatcctgaaaaaggctacagcctacatcctgagcgtgcaggccgagacccagaaactgatcagcgagatcgacctgctgagaaagcagaacgagcagctgaagcacaagctggaacaactcagaaacagctgcgcctaa

SEQ ID NO: 1397 - DNA, 1416 bp, synthetic construct
  source 1..1416: mol_type = other DNA; note = FBXW7a-(GS)6-OMOMYC nucleic acid
aatcaggaactgctctctgtgggcagcaaaagacgacgaactggaggctctctgagaggtaacccttcctcaagccaggtagatgaagaacagatgaatcgtgtggtagaggaggaacagcaacagcaactcagacaacaagaggaggagcacactgcaaggaatggtgaagttgttggagtagaacctagacctggaggccaaaatgattcccagcaaggacagttggaagaaaacaataatagatttatttcggtagatgaggactcctcaggaaaccaagaagaacaagaggaagatgaagaacatgctggtgaacaagatgaggaggatgaggaggaggaggagatggaccaggagagtgacgattttgatcagtctgatgatagtagcagagaagatgaacatacacatactaacagtgtcacgaactccagtagtattgtggacctgcccgttcaccaactctcctccccattctatacaaaaacaacaaaaatgaaaagaaagttggaccatggttctgaggtccgctctttttctttgggaaagaaaccatgcaaagtctcagaatatacaagtaccactgggcttgtaccatgttcagcaacaccaacaacttttggggacctcagagcagccaatggccaagggcaacaacgacgccgaattacatctgtccagccacctacaggcctccaggaatggctaaaaatgtttcagagctggagtggaccagagaaattgcttgctttagatgaactcattgatagttgtgaaccaacacaagtaaaacatatgatgcaagtgatagaaccccagtttcaacgagacttcatttcattgctccctaaagagttggcactctatgtgctttcattcctggaacccaaagacctgctacaagcagctcagacatgtcgctactggagaattttggctgaagacaaccttctctggagagagaaatgcaaagaagaggggattgatgaaccattgcacatcaagagaagaaaagtaataaaaccaggtttcatacacagtccatggaaaagtgcatacatcagacagcacagaattgatactaactcgaggcgaggaggcagcggcagcggcagcggcagcggcagcggcagctctgataccgaggaaaatgtcaagcggagaacccacaacgtgctggaaagacagagacggaatgagctgaagcgctccttcttcgccctgcgggaccagatccccgagctggaaaacaacgagaaggcccctaaggtggtgatcctgaaaaaggctacagcctacatcctgagcgtgcaggccgagacccagaaactgatcagcgagatcgacctgctgagaaagcagaacgagcagctgaagcacaagctggaacaactcagaaacagctgcgcctaa

SEQ ID NO: 1398 - DNA, 1416 bp, synthetic construct
  source 1..1416: mol_type = other DNA; note = HA-FBXW7a-(GS)1-OMOMYC nucleic acid
atgtacccatacgatgttccagattacgctaatcaggaactgctctctgtgggcagcaaaagacgacgaactggaggctctctgagaggtaacccttcctcaagccaggtagatgaagaacagatgaatcgtgtggtagaggaggaacagcaacagcaactcagacaacaagaggaggagcacactgcaaggaatggtgaagttgttggagtagaacctagacctggaggccaaaatgattcccagcaaggacagttggaagaaaacaataatagatttatttcggtagatgaggactcctcaggaaaccaagaagaacaagaggaagatgaagaacatgctggtgaacaagatgaggaggatgaggaggaggaggagatggaccaggagagtgacgattttgatcagtctgatgatagtagcagagaagatgaacatacacatactaacagtgtcacgaactccagtagtattgtggacctgcccgttcaccaactctcctccccattctatacaaaaacaacaaaaatgaaaagaaagttggaccatggttctgaggtccgctctttttctttgggaaagaaaccatgcaaagtctcagaatatacaagtaccactgggcttgtaccatgttcagcaacaccaacaacttttggggacctcagagcagccaatggccaagggcaacaacgacgccgaattacatctgtccagccacctacaggcctccaggaatggctaaaaatgtttcagagctggagtggaccagagaaattgcttgctttagatgaactcattgatagttgtgaaccaacacaagtaaaacatatgatgcaagtgatagaaccccagtttcaacgagacttcatttcattgctccctaaagagttggcactctatgtgctttcattcctggaacccaaagacctgctacaagcagctcagacatgtcgctactggagaattttggctgaagacaaccttctctggagagagaaatgcaaagaagaggggattgatgaaccattgcacatcaagagaagaaaagtaataaaaccaggtttcatacacagtccatggaaaagtgcatacatcagacagcacagaattgatactaactcgaggcgaggaggcagctctgataccgaggaaaatgtcaagcggagaacccacaacgtgctggaaagacagagacggaatgagctgaagcgctccttcttcgccctgcgggaccagatccccgagctggaaaacaacgagaaggcccctaaggtggtgatcctgaaaaaggctacagcctacatcctgagcgtgcaggccgagacccagaaactgatcagcgagatcgacctgctgagaaagcagaacgagcagctgaagcacaagctggaacaactcagaaacagctgcgcctaa

SEQ ID NO: 1399 - DNA, 1422 bp, synthetic construct
  source 1..1422: mol_type = other DNA; note = HA-FBXW7a-(GS)2-OMOMYC nucleic acid
atgtacccatacgatgttccagattacgctaatcaggaactgctctctgtgggcagcaaaagacgacgaactggaggctctctgagaggtaacccttcctcaagccaggtagatgaagaacagatgaatcgtgtggtagaggaggaacagcaacagcaactcagacaacaagaggaggagcacactgcaaggaatggtgaagttgttggagtagaacctagacctggaggccaaaatgattcccagcaaggacagttggaagaaaacaataatagatttatttcggtagatgaggactcctcaggaaaccaagaagaacaagaggaagatgaagaacatgctggtgaacaagatgaggaggatgaggaggaggaggagatggaccaggagagtgacgattttgatcagtctgatgatagtagcagagaagatgaacatacacatactaacagtgtcacgaactccagtagtattgtggacctgcccgttcaccaactctcctccccattctatacaaaaacaacaaaaatgaaaagaaagttggaccatggttctgaggtccgctctttttctttgggaaagaaaccatgcaaagtctcagaatatacaagtaccactgggcttgtaccatgttcagcaacaccaacaacttttggggacctcagagcagccaatggccaagggcaacaacgacgccgaattacatctgtccagccacctacaggcctccaggaatggctaaaaatgtttcagagctggagtggaccagagaaattgcttgctttagatgaactcattgatagttgtgaaccaacacaagtaaaacatatgatgcaagtgatagaaccccagtttcaacgagacttcatttcattgctccctaaagagttggcactctatgtgctttcattcctggaacccaaagacctgctacaagcagctcagacatgtcgctactggagaattttggctgaagacaaccttctctggagagagaaatgcaaagaagaggggattgatgaaccattgcacatcaagagaagaaaagtaataaaaccaggtttcatacacagtccatggaaaagtgcatacatcagacagcacagaattgatactaactcgaggcgaggaggcagcggcagctctgataccgaggaaaatgtcaagcggagaacccacaacgtgctggaaagacagagacggaatgagctgaagcgctccttcttcgccctgcgggaccagatccccgagctggaaaacaacgagaaggcccctaaggtggtgatcctgaaaaaggctacagcctacatcctgagcgtgcaggccgagacccagaaactgatcagcgagatcgacctgctgagaaagcagaacgagcagctgaagcacaagctggaacaactcagaaacagctgcgcctaa

SEQ ID NO: 1400 - DNA, 1428 bp, synthetic construct
  source 1..1428: mol_type = other DNA; note = HA-FBXW7a-(GS)3-OMOMYC nucleic acid
atgtacccatacgatgttccagattacgctaatcaggaactgctctctgtgggcagcaaaagacgacgaactggaggctctctgagaggtaacccttcctcaagccaggtagatgaagaacagatgaatcgtgtggtagaggaggaacagcaacagcaactcagacaacaagaggaggagcacactgcaaggaatggtgaagttgttggagtagaacctagacctggaggccaaaatgattcccagcaaggacagttggaagaaaacaataatagatttatttcggtagatgaggactcctcaggaaaccaagaagaacaagaggaagatgaagaacatgctggtgaacaagatgaggaggatgaggaggaggaggagatggaccaggagagtgacgattttgatcagtctgatgatagtagcagagaagatgaacatacacatactaacagtgtcacgaactccagtagtattgtggacctgcccgttcaccaactctcctccccattctatacaaaaacaacaaaaatgaaaagaaagttggaccatggttctgaggtccgctctttttctttgggaaagaaaccatgcaaagtctcagaatatacaagtaccactgggcttgtaccatgttcagcaacaccaacaacttttggggacctcagagcagccaatggccaagggcaacaacgacgccgaattacatctgtccagccacctacaggcctccaggaatggctaaaaatgtttcagagctggagtggaccagagaaattgcttgctttagatgaactcattgatagttgtgaaccaacacaagtaaaacatatgatgcaagtgatagaaccccagtttcaacgagacttcatttcattgctccctaaagagttggcactctatgtgctttcattcctggaacccaaagacctgctacaagcagctcagacatgtcgctactggagaattttggctgaagacaaccttctctggagagagaaatgcaaagaagaggggattgatgaaccattgcacatcaagagaagaaaagtaataaaaccaggtttcatacacagtccatggaaaagtgcatacatcagacagcacagaattgatactaactcgaggcgaggaggcagcggcagcggcagctctgataccgaggaaaatgtcaagcggagaacccacaacgtgctggaaagacagagacggaatgagctgaagcgctccttcttcgccctgcgggaccagatccccgagctggaaaacaacgagaaggcccctaaggtggtgatcctgaaaaaggctacagcctacatcctgagcgtgcaggccgagacccagaaactgatcagcgagatcgacctgctgagaaagcagaacgagcagctgaagcacaagctggaacaactcagaaacagctgcgcctaa

SEQ ID NO: 1401 - DNA, 1434 bp, synthetic construct
  source 1..1434: mol_type = other DNA; note = HA-FBXW7a-(GS)4-OMOMYC nucleic acid
atgtacccatacgatgttccagattacgctaatcaggaactgctctctgtgggcagcaaaagacgacgaactggaggctctctgagaggtaacccttcctcaagccaggtagatgaagaacagatgaatcgtgtggtagaggaggaacagcaacagcaactcagacaacaagaggaggagcacactgcaaggaatggtgaagttgttggagtagaacctagacctggaggccaaaatgattcccagcaaggacagttggaagaaaacaataatagatttatttcggtagatgaggactcctcaggaaaccaagaagaacaagaggaagatgaagaacatgctggtgaacaagatgaggaggatgaggaggaggaggagatggaccaggagagtgacgattttgatcagtctgatgatagtagcagagaagatgaacatacacatactaacagtgtcacgaactccagtagtattgtggacctgcccgttcaccaactctcctccccattctatacaaaaacaacaaaaatgaaaagaaagttggaccatggttctgaggtccgctctttttctttgggaaagaaaccatgcaaagtctcagaatatacaagtaccactgggcttgtaccatgttcagcaacaccaacaacttttggggacctcagagcagccaatggccaagggcaacaacgacgccgaattacatctgtccagccacctacaggcctccaggaatggctaaaaatgtttcagagctggagtggaccagagaaattgcttgctttagatgaactcattgatagttgtgaaccaacacaagtaaaacatatgatgcaagtgatagaaccccagtttcaacgagacttcatttcattgctccctaaagagttggcactctatgtgctttcattcctggaacccaaagacctgctacaagcagctcagacatgtcgctactggagaattttggctgaagacaaccttctctggagagagaaatgcaaagaagaggggattgatgaaccattgcacatcaagagaagaaaagtaataaaaccaggtttcatacacagtccatggaaaagtgcatacatcagacagcacagaattgatactaactcgaggcgaggaggcagcggcagcggcagcggcagctctgataccgaggaaaatgtcaagcggagaacccacaacgtgctggaaagacagagacggaatgagctgaagcgctccttcttcgccctgcgggaccagatccccgagctggaaaacaacgagaaggcccctaaggtggtgatcctgaaaaaggctacagcctacatcctgagcgtgcaggccgagacccagaaactgatcagcgagatcgacctgctgagaaagcagaacgagcagctgaagcacaagctggaacaactcagaaacagctgcgcctaa

SEQ ID NO: 1402 - DNA, 1440 bp, synthetic construct
  source 1..1440: mol_type = other DNA; note = HA-FBXW7a-(GS)5-OMOMYC nucleic acid
atgtacccatacgatgttccagattacgctaatcaggaactgctctctgtgggcagcaaaagacgacgaactggaggctctctgagaggtaacccttcctcaagccaggtagatgaagaacagatgaatcgtgtggtagaggaggaacagcaacagcaactcagacaacaagaggaggagcacactgcaaggaatggtgaagttgttggagtagaacctagacctggaggccaaaatgattcccagcaaggacagttggaagaaaacaataatagatttatttcggtagatgaggactcctcaggaaaccaagaagaacaagaggaagatgaagaacatgctggtgaacaagatgaggaggatgaggaggaggaggagatggaccaggagagtgacgattttgatcagtctgatgatagtagcagagaagatgaacatacacatactaacagtgtcacgaactccagtagtattgtggacctgcccgttcaccaactctcctccccattctatacaaaaacaacaaaaatgaaaagaaagttggaccatggttctgaggtccgctctttttctttgggaaagaaaccatgcaaagtctcagaatatacaagtaccactgggcttgtaccatgttcagcaacaccaacaacttttggggacctcagagcagccaatggccaagggcaacaacgacgccgaattacatctgtccagccacctacaggcctccaggaatggctaaaaatgtttcagagctggagtggaccagagaaattgcttgctttagatgaactcattgatagttgtgaaccaacacaagtaaaacatatgatgcaagtgatagaaccccagtttcaacgagacttcatttcattgctccctaaagagttggcactctatgtgctttcattcctggaacccaaagacctgctacaagcagctcagacatgtcgctactggagaattttggctgaagacaaccttctctggagagagaaatgcaaagaagaggggattgatgaaccattgcacatcaagagaagaaaagtaataaaaccaggtttcatacacagtccatggaaaagtgcatacatcagacagcacagaattgatactaactcgaggcgaggaggcagcggcagcggcagcggcagcggcagctctgataccgaggaaaatgtcaagcggagaacccacaacgtgctggaaagacagagacggaatgagctgaagcgctccttcttcgccctgcgggaccagatccccgagctggaaaacaacgagaaggcccctaaggtggtgatcctgaaaaaggctacagcctacatcctgagcgtgcaggccgagacccagaaactgatcagcgagatcgacctgctgagaaagcagaacgagcagctgaagcacaagctggaacaactcagaaacagctgcgcctaa

SEQ ID NO: 1403 - DNA, 1446 bp, synthetic construct
  source 1..1446: mol_type = other DNA; note = HA-FBXW7a-(GS)6-OMOMYC nucleic acid
atgtacccatacgatgttccagattacgctaatcaggaactgctctctgtgggcagcaaaagacgacgaactggaggctctctgagaggtaacccttcctcaagccaggtagatgaagaacagatgaatcgtgtggtagaggaggaacagcaacagcaactcagacaacaagaggaggagcacactgcaaggaatggtgaagttgttggagtagaacctagacctggaggccaaaatgattcccagcaaggacagttggaagaaaacaataatagatttatttcggtagatgaggactcctcaggaaaccaagaagaacaagaggaagatgaagaacatgctggtgaacaagatgaggaggatgaggaggaggaggagatggaccaggagagtgacgattttgatcagtctgatgatagtagcagagaagatgaacatacacatactaacagtgtcacgaactccagtagtattgtggacctgcccgttcaccaactctcctccccattctatacaaaaacaacaaaaatgaaaagaaagttggaccatggttctgaggtccgctctttttctttgggaaagaaaccatgcaaagtctcagaatatacaagtaccactgggcttgtaccatgttcagcaacaccaacaacttttggggacctcagagcagccaatggccaagggcaacaacgacgccgaattacatctgtccagccacctacaggcctccaggaatggctaaaaatgtttcagagctggagtggaccagagaaattgcttgctttagatgaactcattgatagttgtgaaccaacacaagtaaaacatatgatgcaagtgatagaaccccagtttcaacgagacttcatttcattgctccctaaagagttggcactctatgtgctttcattcctggaacccaaagacctgctacaagcagctcagacatgtcgctactggagaattttggctgaagacaaccttctctggagagagaaatgcaaagaagaggggattgatgaaccattgcacatcaagagaagaaaagtaataaaaccaggtttcatacacagtccatggaaaagtgcatacatcagacagcacagaattgatactaactcgaggcgaggaggcagcggcagcggcagcggcagcggcagcggcagctctgataccgaggaaaatgtcaagcggagaacccacaacgtgctggaaagacagagacggaatgagctgaagcgctccttcttcgccctgcgggaccagatccccgagctggaaaacaacgagaaggcccctaaggtggtgatcctgaaaaaggctacagcctacatcctgagcgtgcaggccgagacccagaaactgatcagcgagatcgacctgctgagaaagcagaacgagcagctgaagcacaagctggaacaactcagaaacagctgcgcctaa

SEQ ID NO: 1404 - DNA, 1293 bp, synthetic construct
  source 1..1293: mol_type = other DNA; note = NLS-Keap1-(GS)1-OMOMYC nucleic acid
ccggcggcgaaacgcgtgaaactggatggcagcggcagcggcagccagccagatcccaggcctagcggggctggggcctgctgccgattcctgcccctgcagtcacagtgccctgagggggcaggggacgcggtgatgtacgcctccactgagtgcaaggcggaggtgacgccctcccagcatggcaaccgcaccttcagctacaccctggaggatcataccaagcaggcctttggcatcatgaacgagctgcggctcagccagcagctgtgtgacgtcacactgcaggtcaagtaccaggatgcaccggccgcccagttcatggcccacaaggtggtgctggcctcatccagccctgtcttcaaggccatgttcaccaacgggctgcgggagcagggcatggaggtggtgtccattgagggtatccaccccaaggtcatggagcgcctcattgaattcgcctacacggcctccatctccatgggcgagaagtgtgtcctccacgtcatgaacggtgctgtcatgtaccagatcgacagcgttgtccgtgcctgcagtgacttcctggtgcagcagctggaccccagcaatgccatcggcatcgccaacttcgctgagcagattggctgtgtggagttgcaccagcgtgcccgggagtacatctacatgcattttggggaggtggccaagcaagaggagttcttcaacctgtcccactgccaactggtgaccctcatcagccgggacgacctgaacgtgcgctgcgagtccgaggtcttccacgcctgcatcaactgggtcaagtacgactgcgaacagcgacggttctacgtccaggcgctgctgcgggccgtgcgctgccactcgttgacgccgaacttcctgcagatgcagctgcagaagtgcgagatcctgcagtccgactcccgctgcaaggactacctggtcaagatcttcgaggagctcaccctgcacaagcccacgcaggtgatgccctgccgggcgcccggcagctctgataccgaggaaaatgtcaagcggagaacccacaacgtgctggaaagacagagacggaatgagctgaagcgctccttcttcgccctgcgggaccagatccccgagctggaaaacaacgagaaggcccctaaggtggtgatcctgaaaaaggctacagcctacatcctgagcgtgcaggccgagacccagaaactgatcagcgagatcgacctgctgagaaagcagaacgagcagctgaagcacaagctggaacaactcagaaacagctgcgcctaa

SEQ ID NO: 1405 - DNA, 1299 bp, synthetic construct
  source 1..1299: mol_type = other DNA; note = NLS-Keap1-(GS)2-OMOMYC nucleic acid
ccggcggcgaaacgcgtgaaactggatggcagcggcagcggcagccagccagatcccaggcctagcggggctggggcctgctgccgattcctgcccctgcagtcacagtgccctgagggggcaggggacgcggtgatgtacgcctccactgagtgcaaggcggaggtgacgccctcccagcatggcaaccgcaccttcagctacaccctggaggatcataccaagcaggcctttggcatcatgaacgagctgcggctcagccagcagctgtgtgacgtcacactgcaggtcaagtaccaggatgcaccggccgcccagttcatggcccacaaggtggtgctggcctcatccagccctgtcttcaaggccatgttcaccaacgggctgcgggagcagggcatggaggtggtgtccattgagggtatccaccccaaggtcatggagcgcctcattgaattcgcctacacggcctccatctccatgggcgagaagtgtgtcctccacgtcatgaacggtgctgtcatgtaccagatcgacagcgttgtccgtgcctgcagtgacttcctggtgcagcagctggaccccagcaatgccatcggcatcgccaacttcgctgagcagattggctgtgtggagttgcaccagcgtgcccgggagtacatctacatgcattttggggaggtggccaagcaagaggagttcttcaacctgtcccactgccaactggtgaccctcatcagccgggacgacctgaacgtgcgctgcgagtccgaggtcttccacgcctgcatcaactgggtcaagtacgactgcgaacagcgacggttctacgtccaggcgctgctgcgggccgtgcgctgccactcgttgacgccgaacttcctgcagatgcagctgcagaagtgcgagatcctgcagtccgactcccgctgcaaggactacctggtcaagatcttcgaggagctcaccctgcacaagcccacgcaggtgatgccctgccgggcgcccggcagcggcagctctgataccgaggaaaatgtcaagcggagaacccacaacgtgctggaaagacagagacggaatgagctgaagcgctccttcttcgccctgcgggaccagatccccgagctggaaaacaacgagaaggcccctaaggtggtgatcctgaaaaaggctacagcctacatcctgagcgtgcaggccgagacccagaaactgatcagcgagatcgacctgctgagaaagcagaacgagcagctgaagcacaagctggaacaactcagaaacagctgcgcctaa

SEQ ID NO: 1406 - DNA, 1305 bp, synthetic construct
  source 1..1305: mol_type = other DNA; note = NLS-Keap1-(GS)3-OMOMYC nucleic acid
ccggcggcgaaacgcgtgaaactggatggcagcggcagcggcagccagccagatcccaggcctagcggggctggggcctgctgccgattcctgcccctgcagtcacagtgccctgagggggcaggggacgcggtgatgtacgcctccactgagtgcaaggcggaggtgacgccctcccagcatggcaaccgcaccttcagctacaccctggaggatcataccaagcaggcctttggcatcatgaacgagctgcggctcagccagcagctgtgtgacgtcacactgcaggtcaagtaccaggatgcaccggccgcccagttcatggcccacaaggtggtgctggcctcatccagccctgtcttcaaggccatgttcaccaacgggctgcgggagcagggcatggaggtggtgtccattgagggtatccaccccaaggtcatggagcgcctcattgaattcgcctacacggcctccatctccatgggcgagaagtgtgtcctccacgtcatgaacggtgctgtcatgtaccagatcgacagcgttgtccgtgcctgcagtgacttcctggtgcagcagctggaccccagcaatgccatcggcatcgccaacttcgctgagcagattggctgtgtggagttgcaccagcgtgcccgggagtacatctacatgcattttggggaggtggccaagcaagaggagttcttcaacctgtcccactgccaactggtgaccctcatcagccgggacgacctgaacgtgcgctgcgagtccgaggtcttccacgcctgcatcaactgggtcaagtacgactgcgaacagcgacggttctacgtccaggcgctgctgcgggccgtgcgctgccactcgttgacgccgaacttcctgcagatgcagctgcagaagtgcgagatcctgcagtccgactcccgctgcaaggactacctggtcaagatcttcgaggagctcaccctgcacaagcccacgcaggtgatgccctgccgggcgcccggcagcggcagcggcagctctgataccgaggaaaatgtcaagcggagaacccacaacgtgctggaaagacagagacggaatgagctgaagcgctccttcttcgccctgcgggaccagatccccgagctggaaaacaacgagaaggcccctaaggtggtgatcctgaaaaaggctacagcctacatcctgagcgtgcaggccgagacccagaaactgatcagcgagatcgacctgctgagaaagcagaacgagcagctgaagcacaagctggaacaactcagaaacagctgcgcctaa

SEQ ID NO: 1407 - DNA, 1311 bp, synthetic construct
  source 1..1311: mol_type = other DNA; note = NLS-Keap1-(GS)4-OMOMYC nucleic acid
ccggcggcgaaacgcgtgaaactggatggcagcggcagcggcagccagccagatcccaggcctagcggggctggggcctgctgccgattcctgcccctgcagtcacagtgccctgagggggcaggggacgcggtgatgtacgcctccactgagtgcaaggcggaggtgacgccctcccagcatggcaaccgcaccttcagctacaccctggaggatcataccaagcaggcctttggcatcatgaacgagctgcggctcagccagcagctgtgtgacgtcacactgcaggtcaagtaccaggatgcaccggccgcccagttcatggcccacaaggtggtgctggcctcatccagccctgtcttcaaggccatgttcaccaacgggctgcgggagcagggcatggaggtggtgtccattgagggtatccaccccaaggtcatggagcgcctcattgaattcgcctacacggcctccatctccatgggcgagaagtgtgtcctccacgtcatgaacggtgctgtcatgtaccagatcgacagcgttgtccgtgcctgcagtgacttcctggtgcagcagctggaccccagcaatgccatcggcatcgccaacttcgctgagcagattggctgtgtggagttgcaccagcgtgcccgggagtacatctacatgcattttggggaggtggccaagcaagaggagttcttcaacctgtcccactgccaactggtgaccctcatcagccgggacgacctgaacgtgcgctgcgagtccgaggtcttccacgcctgcatcaactgggtcaagtacgactgcgaacagcgacggttctacgtccaggcgctgctgcgggccgtgcgctgccactcgttgacgccgaacttcctgcagatgcagctgcagaagtgcgagatcctgcagtccgactcccgctgcaaggactacctggtcaagatcttcgaggagctcaccctgcacaagcccacgcaggtgatgccctgccgggcgcccggcagcggcagcggcagcggcagctctgataccgaggaaaatgtcaagcggagaacccacaacgtgctggaaagacagagacggaatgagctgaagcgctccttcttcgccctgcgggaccagatccccgagctggaaaacaacgagaaggcccctaaggtggtgatcctgaaaaaggctacagcctacatcctgagcgtgcaggccgagacccagaaactgatcagcgagatcgacctgctgagaaagcagaacgagcagctgaagcacaagctggaacaactcagaaacagctgcgcctaa

SEQ ID NO: 1408 - DNA, 1317 bp, synthetic construct
  source 1..1317: mol_type = other DNA; note = NLS-Keap1-(GS)5-OMOMYC nucleic acid
ccggcggcgaaacgcgtgaaactggatggcagcggcagcggcagccagccagatcccaggcctagcggggctggggcctgctgccgattcctgcccctgcagtcacagtgccctgagggggcaggggacgcggtgatgtacgcctccactgagtgcaaggcggaggtgacgccctcccagcatggcaaccgcaccttcagctacaccctggaggatcataccaagcaggcctttggcatcatgaacgagctgcggctcagccagcagctgtgtgacgtcacactgcaggtcaagtaccaggatgcaccggccgcccagttcatggcccacaaggtggtgctggcctcatccagccctgtcttcaaggccatgttcaccaacgggctgcgggagcagggcatggaggtggtgtccattgagggtatccaccccaaggtcatggagcgcctcattgaattcgcctacacggcctccatctccatgggcgagaagtgtgtcctccacgtcatgaacggtgctgtcatgtaccagatcgacagcgttgtccgtgcctgcagtgacttcctggtgcagcagctggaccccagcaatgccatcggcatcgccaacttcgctgagcagattggctgtgtggagttgcaccagcgtgcccgggagtacatctacatgcattttggggaggtggccaagcaagaggagttcttcaacctgtcccactgccaactggtgaccctcatcagccgggacgacctgaacgtgcgctgcgagtccgaggtcttccacgcctgcatcaactgggtcaagtacgactgcgaacagcgacggttctacgtccaggcgctgctgcgggccgtgcgctgccactcgttgacgccgaacttcctgcagatgcagctgcagaagtgcgagatcctgcagtccgactcccgctgcaaggactacctggtcaagatcttcgaggagctcaccctgcacaagcccacgcaggtgatgccctgccgggcgcccggcagcggcagcggcagcggcagcggcagctctgataccgaggaaaatgtcaagcggagaacccacaacgtgctggaaagacagagacggaatgagctgaagcgctccttcttcgccctgcgggaccagatccccgagctggaaaacaacgagaaggcccctaaggtggtgatcctgaaaaaggctacagcctacatcctgagcgtgcaggccgagacccagaaactgatcagcgagatcgacctgctgagaaagcagaacgagcagctgaagcacaagctggaacaactcagaaacagctgcgcctaa

SEQ ID NO: 1409 - DNA, 1323 bp, synthetic construct
  source 1..1323: mol_type = other DNA; note = NLS-Keap1-(GS)6-OMOMYC nucleic acid
ccggcggcgaaacgcgtgaaactggatggcagcggcagcggcagccagccagatcccaggcctagcggggctggggcctgctgccgattcctgcccctgcagtcacagtgccctgagggggcaggggacgcggtgatgtacgcctccactgagtgcaaggcggaggtgacgccctcccagcatggcaaccgcaccttcagctacaccctggaggatcataccaagcaggcctttggcatcatgaacgagctgcggctcagccagcagctgtgtgacgtcacactgcaggtcaagtaccaggatgcaccggccgcccagttcatggcccacaaggtggtgctggcctcatccagccctgtcttcaaggccatgttcaccaacgggctgcgggagcagggcatggaggtggtgtccattgagggtatccaccccaaggtcatggagcgcctcattgaattcgcctacacggcctccatctccatgggcgagaagtgtgtcctccacgtcatgaacggtgctgtcatgtaccagatcgacagcgttgtccgtgcctgcagtgacttcctggtgcagcagctggaccccagcaatgccatcggcatcgccaacttcgctgagcagattggctgtgtggagttgcaccagcgtgcccgggagtacatctacatgcattttggggaggtggccaagcaagaggagttcttcaacctgtcccactgccaactggtgaccctcatcagccgggacgacctgaacgtgcgctgcgagtccgaggtcttccacgcctgcatcaactgggtcaagtacgactgcgaacagcgacggttctacgtccaggcgctgctgcgggccgtgcgctgccactcgttgacgccgaacttcctgcagatgcagctgcagaagtgcgagatcctgcagtccgactcccgctgcaaggactacctggtcaagatcttcgaggagctcaccctgcacaagcccacgcaggtgatgccctgccgggcgcccggcagcggcagcggcagcggcagcggcagcggcagctctgataccgaggaaaatgtcaagcggagaacccacaacgtgctggaaagacagagacggaatgagctgaagcgctccttcttcgccctgcgggaccagatccccgagctggaaaacaacgagaaggcccctaaggtggtgatcctgaaaaaggctacagcctacatcctgagcgtgcaggccgagacccagaaactgatcagcgagatcgacctgctgagaaagcagaacgagcagctgaagcacaagctggaacaactcagaaacagctgcgcctaa

SEQ ID NO: 1410 - DNA, 1323 bp, synthetic construct
  source 1..1323: mol_type = other DNA; note = HA-NLS-Keap1-(GS)1-OMOMYC nucleic acid
atgtacccatacgatgttccagattacgctccggcggcgaaacgcgtgaaactggatggcagcggcagcggcagccagccagatcccaggcctagcggggctggggcctgctgccgattcctgcccctgcagtcacagtgccctgagggggcaggggacgcggtgatgtacgcctccactgagtgcaaggcggaggtgacgccctcccagcatggcaaccgcaccttcagctacaccctggaggatcataccaagcaggcctttggcatcatgaacgagctgcggctcagccagcagctgtgtgacgtcacactgcaggtcaagtaccaggatgcaccggccgcccagttcatggcccacaaggtggtgctggcctcatccagccctgtcttcaaggccatgttcaccaacgggctgcgggagcagggcatggaggtggtgtccattgagggtatccaccccaaggtcatggagcgcctcattgaattcgcctacacggcctccatctccatgggcgagaagtgtgtcctccacgtcatgaacggtgctgtcatgtaccagatcgacagcgttgtccgtgcctgcagtgacttcctggtgcagcagctggaccccagcaatgccatcggcatcgccaacttcgctgagcagattggctgtgtggagttgcaccagcgtgcccgggagtacatctacatgcattttggggaggtggccaagcaagaggagttcttcaacctgtcccactgccaactggtgaccctcatcagccgggacgacctgaacgtgcgctgcgagtccgaggtcttccacgcctgcatcaactgggtcaagtacgactgcgaacagcgacggttctacgtccaggcgctgctgcgggccgtgcgctgccactcgttgacgccgaacttcctgcagatgcagctgcagaagtgcgagatcctgcagtccgactcccgctgcaaggactacctggtcaagatcttcgaggagctcaccctgcacaagcccacgcaggtgatgccctgccgggcgcccggcagctctgataccgaggaaaatgtcaagcggagaacccacaacgtgctggaaagacagagacggaatgagctgaagcgctccttcttcgccctgcgggaccagatccccgagctggaaaacaacgagaaggcccctaaggtggtgatcctgaaaaaggctacagcctacatcctgagcgtgcaggccgagacccagaaactgatcagcgagatcgacctgctgagaaagcagaacgagcagctgaagcacaagctggaacaactcagaaacagctgcgcctaa

SEQ ID NO: 1411 - DNA, 1329 bp, synthetic construct
  source 1..1329: mol_type = other DNA; note = HA-NLS-Keap1-(GS)2-OMOMYC nucleic acid
atgtacccatacgatgttccagattacgctccggcggcgaaacgcgtgaaactggatggcagcggcagcggcagccagccagatcccaggcctagcggggctggggcctgctgccgattcctgcccctgcagtcacagtgccctgagggggcaggggacgcggtgatgtacgcctccactgagtgcaaggcggaggtgacgccctcccagcatggcaaccgcaccttcagctacaccctggaggatcataccaagcaggcctttggcatcatgaacgagctgcggctcagccagcagctgtgtgacgtcacactgcaggtcaagtaccaggatgcaccggccgcccagttcatggcccacaaggtggtgctggcctcatccagccctgtcttcaaggccatgttcaccaacgggctgcgggagcagggcatggaggtggtgtccattgagggtatccaccccaaggtcatggagcgcctcattgaattcgcctacacggcctccatctccatgggcgagaagtgtgtcctccacgtcatgaacggtgctgtcatgtaccagatcgacagcgttgtccgtgcctgcagtgacttcctggtgcagcagctggaccccagcaatgccatcggcatcgccaacttcgctgagcagattggctgtgtggagttgcaccagcgtgcccgggagtacatctacatgcattttggggaggtggccaagcaagaggagttcttcaacctgtcccactgccaactggtgaccctcatcagccgggacgacctgaacgtgcgctgcgagtccgaggtcttccacgcctgcatcaactgggtcaagtacgactgcgaacagcgacggttctacgtccaggcgctgctgcgggccgtgcgctgccactcgttgacgccgaacttcctgcagatgcagctgcagaagtgcgagatcctgcagtccgactcccgctgcaaggactacctggtcaagatcttcgaggagctcaccctgcacaagcccacgcaggtgatgccctgccgggcgcccggcagcggcagctctgataccgaggaaaatgtcaagcggagaacccacaacgtgctggaaagacagagacggaatgagctgaagcgctccttcttcgccctgcgggaccagatccccgagctggaaaacaacgagaaggcccctaaggtggtgatcctgaaaaaggctacagcctacatcctgagcgtgcaggccgagacccagaaactgatcagcgagatcgacctgctgagaaagcagaacgagcagctgaagcacaagctggaacaactcagaaacagctgcgcctaa

SEQ ID NO: 1412 - DNA, 1335 bp, synthetic construct
  source 1..1335: mol_type = other DNA; note = HA-NLS-Keap1-(GS)3-OMOMYC nucleic acid
atgtacccatacgatgttccagattacgctccggcggcgaaacgcgtgaaactggatggcagcggcagcggcagccagccagatcccaggcctagcggggctggggcctgctgccgattcctgcccctgcagtcacagtgccctgagggggcaggggacgcggtgatgtacgcctccactgagtgcaaggcggaggtgacgccctcccagcatggcaaccgcaccttcagctacaccctggaggatcataccaagcaggcctttggcatcatgaacgagctgcggctcagccagcagctgtgtgacgtcacactgcaggtcaagtaccaggatgcaccggccgcccagttcatggcccacaaggtggtgctggcctcatccagccctgtcttcaaggccatgttcaccaacgggctgcgggagcagggcatggaggtggtgtccattgagggtatccaccccaaggtcatggagcgcctcattgaattcgcctacacggcctccatctccatgggcgagaagtgtgtcctccacgtcatgaacggtgctgtcatgtaccagatcgacagcgttgtccgtgcctgcagtgacttcctggtgcagcagctggaccccagcaatgccatcggcatcgccaacttcgctgagcagattggctgtgtggagttgcaccagcgtgcccgggagtacatctacatgcattttggggaggtggccaagcaagaggagttcttcaacctgtcccactgccaactggtgaccctcatcagccgggacgacctgaacgtgcgctgcgagtccgaggtcttccacgcctgcatcaactgggtcaagtacgactgcgaacagcgacggttctacgtccaggcgctgctgcgggccgtgcgctgccactcgttgacgccgaacttcctgcagatgcagctgcagaagtgcgagatcctgcagtccgactcccgctgcaaggactacctggtcaagatcttcgaggagctcaccctgcacaagcccacgcaggtgatgccctgccgggcgcccggcagcggcagcggcagctctgataccgaggaaaatgtcaagcggagaacccacaacgtgctggaaagacagagacggaatgagctgaagcgctccttcttcgccctgcgggaccagatccccgagctggaaaacaacgagaaggcccctaaggtggtgatcctgaaaaaggctacagcctacatcctgagcgtgcaggccgagacccagaaactgatcagcgagatcgacctgctgagaaagcagaacgagcagctgaagcacaagctggaacaactcagaaacagctgcgcctaa

SEQ ID NO: 1413 - DNA, 1341 bp, synthetic construct
  source 1..1341: mol_type = other DNA; note = HA-NLS-Keap1-(GS)4-OMOMYC nucleic acid
atgtacccatacgatgttccagattacgctccggcggcgaaacgcgtgaaactggatggcagcggcagcggcagccagccagatcccaggcctagcggggctggggcctgctgccgattcctgcccctgcagtcacagtgccctgagggggcaggggacgcggtgatgtacgcctccactgagtgcaaggcggaggtgacgccctcccagcatggcaaccgcaccttcagctacaccctggaggatcataccaagcaggcctttggcatcatgaacgagctgcggctcagccagcagctgtgtgacgtcacactgcaggtcaagtaccaggatgcaccggccgcccagttcatggcccacaaggtggtgctggcctcatccagccctgtcttcaaggccatgttcaccaacgggctgcgggagcagggcatggaggtggtgtccattgagggtatccaccccaaggtcatggagcgcctcattgaattcgcctacacggcctccatctccatgggcgagaagtgtgtcctccacgtcatgaacggtgctgtcatgtaccagatcgacagcgttgtccgtgcctgcagtgacttcctggtgcagcagctggaccccagcaatgccatcggcatcgccaacttcgctgagcagattggctgtgtggagttgcaccagcgtgcccgggagtacatctacatgcattttggggaggtggccaagcaagaggagttcttcaacctgtcccactgccaactggtgaccctcatcagccgggacgacctgaacgtgcgctgcgagtccgaggtcttccacgcctgcatcaactgggtcaagtacgactgcgaacagcgacggttctacgtccaggcgctgctgcgggccgtgcgctgccactcgttgacgccgaacttcctgcagatgcagctgcagaagtgcgagatcctgcagtccgactcccgctgcaaggactacctggtcaagatcttcgaggagctcaccctgcacaagcccacgcaggtgatgccctgccgggcgcccggcagcggcagcggcagcggcagctctgataccgaggaaaatgtcaagcggagaacccacaacgtgctggaaagacagagacggaatgagctgaagcgctccttcttcgccctgcgggaccagatccccgagctggaaaacaacgagaaggcccctaaggtggtgatcctgaaaaaggctacagcctacatcctgagcgtgcaggccgagacccagaaactgatcagcgagatcgacctgctgagaaagcagaacgagcagctgaagcacaagctggaacaactcagaaacagctgcgcctaa

SEQ ID NO: 1414 - DNA, 1347 bp, synthetic construct
  source 1..1347: mol_type = other DNA; note = HA-NLS-Keap1-(GS)5-OMOMYC nucleic acid
atgtacccatacgatgttccagattacgctccggcggcgaaacgcgtgaaactggatggcagcggcagcggcagccagccagatcccaggcctagcggggctggggcctgctgccgattcctgcccctgcagtcacagtgccctgagggggcaggggacgcggtgatgtacgcctccactgagtgcaaggcggaggtgacgccctcccagcatggcaaccgcaccttcagctacaccctggaggatcataccaagcaggcctttggcatcatgaacgagctgcggctcagccagcagctgtgtgacgtcacactgcaggtcaagtaccaggatgcaccggccgcccagttcatggcccacaaggtggtgctggcctcatccagccctgtcttcaaggccatgttcaccaacgggctgcgggagcagggcatggaggtggtgtccattgagggtatccaccccaaggtcatggagcgcctcattgaattcgcctacacggcctccatctccatgggcgagaagtgtgtcctccacgtcatgaacggtgctgtcatgtaccagatcgacagcgttgtccgtgcctgcagtgacttcctggtgcagcagctggaccccagcaatgccatcggcatcgccaacttcgctgagcagattggctgtgtggagttgcaccagcgtgcccgggagtacatctacatgcattttggggaggtggccaagcaagaggagttcttcaacctgtcccactgccaactggtgaccctcatcagccgggacgacctgaacgtgcgctgcgagtccgaggtcttccacgcctgcatcaactgggtcaagtacgactgcgaacagcgacggttctacgtccaggcgctgctgcgggccgtgcgctgccactcgttgacgccgaacttcctgcagatgcagctgcagaagtgcgagatcctgcagtccgactcccgctgcaaggactacctggtcaagatcttcgaggagctcaccctgcacaagcccacgcaggtgatgccctgccgggcgcccggcagcggcagcggcagcggcagcggcagctctgataccgaggaaaatgtcaagcggagaacccacaacgtgctggaaagacagagacggaatgagctgaagcgctccttcttcgccctgcgggaccagatccccgagctggaaaacaacgagaaggcccctaaggtggtgatcctgaaaaaggctacagcctacatcctgagcgtgcaggccgagacccagaaactgatcagcgagatcgacctgctgagaaagcagaacgagcagctgaagcacaagctggaacaactcagaaacagctgcgcctaa

SEQ ID NO: 1415 - DNA, 1353 bp, synthetic construct
  source 1..1353: mol_type = other DNA; note = HA-NLS-Keap1-(GS)6-OMOMYC nucleic acid
atgtacccatacgatgttccagattacgctccggcggcgaaacgcgtgaaactggatggcagcggcagcggcagccagccagatcccaggcctagcggggctggggcctgctgccgattcctgcccctgcagtcacagtgccctgagggggcaggggacgcggtgatgtacgcctccactgagtgcaaggcggaggtgacgccctcccagcatggcaaccgcaccttcagctacaccctggaggatcataccaagcaggcctttggcatcatgaacgagctgcggctcagccagcagctgtgtgacgtcacactgcaggtcaagtaccaggatgcaccggccgcccagttcatggcccacaaggtggtgctggcctcatccagccctgtcttcaaggccatgttcaccaacgggctgcgggagcagggcatggaggtggtgtccattgagggtatccaccccaaggtcatggagcgcctcattgaattcgcctacacggcctccatctccatgggcgagaagtgtgtcctccacgtcatgaacggtgctgtcatgtaccagatcgacagcgttgtccgtgcctgcagtgacttcctggtgcagcagctggaccccagcaatgccatcggcatcgccaacttcgctgagcagattggctgtgtggagttgcaccagcgtgcccgggagtacatctacatgcattttggggaggtggccaagcaagaggagttcttcaacctgtcccactgccaactggtgaccctcatcagccgggacgacctgaacgtgcgctgcgagtccgaggtcttccacgcctgcatcaactgggtcaagtacgactgcgaacagcgacggttctacgtccaggcgctgctgcgggccgtgcgctgccactcgttgacgccgaacttcctgcagatgcagctgcagaagtgcgagatcctgcagtccgactcccgctgcaaggactacctggtcaagatcttcgaggagctcaccctgcacaagcccacgcaggtgatgccctgccgggcgcccggcagcggcagcggcagcggcagcggcagcggcagctctgataccgaggaaaatgtcaagcggagaacccacaacgtgctggaaagacagagacggaatgagctgaagcgctccttcttcgccctgcgggaccagatccccgagctggaaaacaacgagaaggcccctaaggtggtgatcctgaaaaaggctacagcctacatcctgagcgtgcaggccgagacccagaaactgatcagcgagatcgacctgctgagaaagcagaacgagcagctgaagcacaagctggaacaactcagaaacagctgcgcctaa

SEQ ID NO: 1416 - DNA, 711 bp, synthetic construct
  source 1..711: mol_type = other DNA; note = NLS-RNF125-(GS)1-OMOMYC nucleic acid
ccggcggcgaaacgcgtgaaactggatggcagcggcagcggcagcggctccgtgctgagcaccgacagcggcaaatcggcgcccgcctctgccaccgcgcgggccctggagcgcaggagggacccggagttgcccgtcacgtccttcgactgcgccgtgtgccttgaggtgttacaccagcctgtccggacccgctgcggccacgtattctgccgttcctgtattgctaccagtctgaagaacaacaagtggacctgtccttattgccgggcatatcttccttcagaaggagttccagcaactgatgtagccaaaagaatgaaatcagagtataagaactgcgctgagtgtgacaccctggtttgcctcagtgaaatgagggcacatattcggacttgtcagaagtacatagataagtatggaccaggcagctctgataccgaggaaaatgtcaagcggagaacccacaacgtgctggaaagacagagacggaatgagctgaagcgctccttcttcgccctgcgggaccagatccccgagctggaaaacaacgagaaggcccctaaggtggtgatcctgaaaaaggctacagcctacatcctgagcgtgcaggccgagacccagaaactgatcagcgagatcgacctgctgagaaagcagaacgagcagctgaagcacaagctggaacaactcagaaacagctgcgcctaa

SEQ ID NO: 1417 - DNA, 717 bp, synthetic construct
  source 1..717: mol_type = other DNA; note = NLS-RNF125-(GS)2-OMOMYC nucleic acid
ccggcggcgaaacgcgtgaaactggatggcagcggcagcggcagcggctccgtgctgagcaccgacagcggcaaatcggcgcccgcctctgccaccgcgcgggccctggagcgcaggagggacccggagttgcccgtcacgtccttcgactgcgccgtgtgccttgaggtgttacaccagcctgtccggacccgctgcggccacgtattctgccgttcctgtattgctaccagtctgaagaacaacaagtggacctgtccttattgccgggcatatcttccttcagaaggagttccagcaactgatgtagccaaaagaatgaaatcagagtataagaactgcgctgagtgtgacaccctggtttgcctcagtgaaatgagggcacatattcggacttgtcagaagtacatagataagtatggaccaggcagcggcagctctgataccgaggaaaatgtcaagcggagaacccacaacgtgctggaaagacagagacggaatgagctgaagcgctccttcttcgccctgcgggaccagatccccgagctggaaaacaacgagaaggcccctaaggtggtgatcctgaaaaaggctacagcctacatcctgagcgtgcaggccgagacccagaaactgatcagcgagatcgacctgctgagaaagcagaacgagcagctgaagcacaagctggaacaactcagaaacagctgcgcctaa

SEQ ID NO: 1418 - DNA, 723 bp, synthetic construct
  source 1..723: mol_type = other DNA; note = NLS-RNF125-(GS)3-OMOMYC nucleic acid
ccggcggcgaaacgcgtgaaactggatggcagcggcagcggcagcggctccgtgctgagcaccgacagcggcaaatcggcgcccgcctctgccaccgcgcgggccctggagcgcaggagggacccggagttgcccgtcacgtccttcgactgcgccgtgtgccttgaggtgttacaccagcctgtccggacccgctgcggccacgtattctgccgttcctgtattgctaccagtctgaagaacaacaagtggacctgtccttattgccgggcatatcttccttcagaaggagttccagcaactgatgtagccaaaagaatgaaatcagagtataagaactgcgctgagtgtgacaccctggtttgcctcagtgaaatgagggcacatattcggacttgtcagaagtacatagataagtatggaccaggcagcggcagcggcagctctgataccgaggaaaatgtcaagcggagaacccacaacgtgctggaaagacagagacggaatgagctgaagcgctccttcttcgccctgcgggaccagatccccgagctggaaaacaacgagaaggcccctaaggtggtgatcctgaaaaaggctacagcctacatcctgagcgtgcaggccgagacccagaaactgatcagcgagatcgacctgctgagaaagcagaacgagcagctgaagcacaagctggaacaactcagaaacagctgcgcctaa

SEQ ID NO: 1419 - DNA, 729 bp, synthetic construct
  source 1..729: mol_type = other DNA; note = NLS-RNF125-(GS)4-OMOMYC nucleic acid
ccggcggcgaaacgcgtgaaactggatggcagcggcagcggcagcggctccgtgctgagcaccgacagcggcaaatcggcgcccgcctctgccaccgcgcgggccctggagcgcaggagggacccggagttgcccgtcacgtccttcgactgcgccgtgtgccttgaggtgttacaccagcctgtccggacccgctgcggccacgtattctgccgttcctgtattgctaccagtctgaagaacaacaagtggacctgtccttattgccgggcatatcttccttcagaaggagttccagcaactgatgtagccaaaagaatgaaatcagagtataagaactgcgctgagtgtgacaccctggtttgcctcagtgaaatgagggcacatattcggacttgtcagaagtacatagataagtatggaccaggcagcggcagcggcagcggcagctctgataccgaggaaaatgtcaagcggagaacccacaacgtgctggaaagacagagacggaatgagctgaagcgctccttcttcgccctgcgggaccagatccccgagctggaaaacaacgagaaggcccctaaggtggtgatcctgaaaaaggctacagcctacatcctgagcgtgcaggccgagacccagaaactgatcagcgagatcgacctgctgagaaagcagaacgagcagctgaagcacaagctggaacaactcagaaacagctgcgcctaa

SEQ ID NO: 1420 - DNA, 735 bp, synthetic construct
  source 1..735: mol_type = other DNA; note = NLS-RNF125-(GS)5-OMOMYC nucleic acid
ccggcggcgaaacgcgtgaaactggatggcagcggcagcggcagcggctccgtgctgagcaccgacagcggcaaatcggcgcccgcctctgccaccgcgcgggccctggagcgcaggagggacccggagttgcccgtcacgtccttcgactgcgccgtgtgccttgaggtgttacaccagcctgtccggacccgctgcggccacgtattctgccgttcctgtattgctaccagtctgaagaacaacaagtggacctgtccttattgccgggcatatcttccttcagaaggagttccagcaactgatgtagccaaaagaatgaaatcagagtataagaactgcgctgagtgtgacaccctggtttgcctcagtgaaatgagggcacatattcggacttgtcagaagtacatagataagtatggaccaggcagcggcagcggcagcggcagcggcagctctgataccgaggaaaatgtcaagcggagaacccacaacgtgctggaaagacagagacggaatgagctgaagcgctccttcttcgccctgcgggaccagatccccgagctggaaaacaacgagaaggcccctaaggtggtgatcctgaaaaaggctacagcctacatcctgagcgtgcaggccgagacccagaaactgatcagcgagatcgacctgctgagaaagcagaacgagcagctgaagcacaagctggaacaactcagaaacagctgcgcctaa

SEQ ID NO: 1421 - DNA, 741 bp, synthetic construct
  source 1..741: mol_type = other DNA; note = NLS-RNF125-(GS)6-OMOMYC nucleic acid
ccggcggcgaaacgcgtgaaactggatggcagcggcagcggcagcggctccgtgctgagcaccgacagcggcaaatcggcgcccgcctctgccaccgcgcgggccctggagcgcaggagggacccggagttgcccgtcacgtccttcgactgcgccgtgtgccttgaggtgttacaccagcctgtccggacccgctgcggccacgtattctgccgttcctgtattgctaccagtctgaagaacaacaagtggacctgtccttattgccgggcatatcttccttcagaaggagttccagcaactgatgtagccaaaagaatgaaatcagagtataagaactgcgctgagtgtgacaccctggtttgcctcagtgaaatgagggcacatattcggacttgtcagaagtacatagataagtatggaccaggcagcggcagcggcagcggcagcggcagcggcagctctgataccgaggaaaatgtcaagcggagaacccacaacgtgctggaaagacagagacggaatgagctgaagcgctccttcttcgccctgcgggaccagatccccgagctggaaaacaacgagaaggcccctaaggtggtgatcctgaaaaaggctacagcctacatcctgagcgtgcaggccgagacccagaaactgatcagcgagatcgacctgctgagaaagcagaacgagcagctgaagcacaagctggaacaactcagaaacagctgcgcctaa

SEQ ID NO: 1422 - DNA, 741 bp, synthetic construct
  source 1..741: mol_type = other DNA; note = HA-NLS-RNF125-(GS)1-OMOMYC nucleic acid
atgtacccatacgatgttccagattacgctccggcggcgaaacgcgtgaaactggatggcagcggcagcggcagcggctccgtgctgagcaccgacagcggcaaatcggcgcccgcctctgccaccgcgcgggccctggagcgcaggagggacccggagttgcccgtcacgtccttcgactgcgccgtgtgccttgaggtgttacaccagcctgtccggacccgctgcggccacgtattctgccgttcctgtattgctaccagtctgaagaacaacaagtggacctgtccttattgccgggcatatcttccttcagaaggagttccagcaactgatgtagccaaaagaatgaaatcagagtataagaactgcgctgagtgtgacaccctggtttgcctcagtgaaatgagggcacatattcggacttgtcagaagtacatagataagtatggaccaggcagctctgataccgaggaaaatgtcaagcggagaacccacaacgtgctggaaagacagagacggaatgagctgaagcgctccttcttcgccctgcgggaccagatccccgagctggaaaacaacgagaaggcccctaaggtggtgatcctgaaaaaggctacagcctacatcctgagcgtgcaggccgagacccagaaactgatcagcgagatcgacctgctgagaaagcagaacgagcagctgaagcacaagctggaacaactcagaaacagctgcgcctaa

SEQ ID NO: 1423 - DNA, 747 bp, synthetic construct
  source 1..747: mol_type = other DNA; note = HA-NLS-RNF125-(GS)2-OMOMYC nucleic acid
atgtacccatacgatgttccagattacgctccggcggcgaaacgcgtgaaactggatggcagcggcagcggcagcggctccgtgctgagcaccgacagcggcaaatcggcgcccgcctctgccaccgcgcgggccctggagcgcaggagggacccggagttgcccgtcacgtccttcgactgcgccgtgtgccttgaggtgttacaccagcctgtccggacccgctgcggccacgtattctgccgttcctgtattgctaccagtctgaagaacaacaagtggacctgtccttattgccgggcatatcttccttcagaaggagttccagcaactgatgtagccaaaagaatgaaatcagagtataagaactgcgctgagtgtgacaccctggtttgcctcagtgaaatgagggcacatattcggacttgtcagaagtacatagataagtatggaccaggcagcggcagctctgataccgaggaaaatgtcaagcggagaacccacaacgtgctggaaagacagagacggaatgagctgaagcgctccttcttcgccctgcgggaccagatccccgagctggaaaacaacgagaaggcccctaaggtggtgatcctgaaaaaggctacagcctacatcctgagcgtgcaggccgagacccagaaactgatcagcgagatcgacctgctgagaaagcagaacgagcagctgaagcacaagctggaacaactcagaaacagctgcgcctaa

SEQ ID NO: 1424 - DNA, 753 bp, synthetic construct
  source 1..753: mol_type = other DNA; note = HA-NLS-RNF125-(GS)3-OMOMYC nucleic acid
atgtacccatacgatgttccagattacgctccggcggcgaaacgcgtgaaactggatggcagcggcagcggcagcggctccgtgctgagcaccgacagcggcaaatcggcgcccgcctctgccaccgcgcgggccctggagcgcaggagggacccggagttgcccgtcacgtccttcgactgcgccgtgtgccttgaggtgttacaccagcctgtccggacccgctgcggccacgtattctgccgttcctgtattgctaccagtctgaagaacaacaagtggacctgtccttattgccgggcatatcttccttcagaaggagttccagcaactgatgtagccaaaagaatgaaatcagagtataagaactgcgctgagtgtgacaccctggtttgcctcagtgaaatgagggcacatattcggacttgtcagaagtacatagataagtatggaccaggcagcggcagcggcagctctgataccgaggaaaatgtcaagcggagaacccacaacgtgctggaaagacagagacggaatgagctgaagcgctccttcttcgccctgcgggaccagatccccgagctggaaaacaacgagaaggcccctaaggtggtgatcctgaaaaaggctacagcctacatcctgagcgtgcaggccgagacccagaaactgatcagcgagatcgacctgctgagaaagcagaacgagcagctgaagcacaagctggaacaactcagaaacagctgcgcctaa

SEQ ID NO: 1425 - DNA, 759 bp, synthetic construct
  source 1..759: mol_type = other DNA; note = HA-NLS-RNF125-(GS)4-OMOMYC nucleic acid
atgtacccatacgatgttccagattacgctccggcggcgaaacgcgtgaaactggatggcagcggcagcggcagcggctccgtgctgagcaccgacagcggcaaatcggcgcccgcctctgccaccgcgcgggccctggagcgcaggagggacccggagttgcccgtcacgtccttcgactgcgccgtgtgccttgaggtgttacaccagcctgtccggacccgctgcggccacgtattctgccgttcctgtattgctaccagtctgaagaacaacaagtggacctgtccttattgccgggcatatcttccttcagaaggagttccagcaactgatgtagccaaaagaatgaaatcagagtataagaactgcgctgagtgtgacaccctggtttgcctcagtgaaatgagggcacatattcggacttgtcagaagtacatagataagtatggaccaggcagcggcagcggcagcggcagctctgataccgaggaaaatgtcaagcggagaacccacaacgtgctggaaagacagagacggaatgagctgaagcgctccttcttcgccctgcgggaccagatccccgagctggaaaacaacgagaaggcccctaaggtggtgatcctgaaaaaggctacagcctacatcctgagcgtgcaggccgagacccagaaactgatcagcgagatcgacctgctgagaaagcagaacgagcagctgaagcacaagctggaacaactcagaaacagctgcgcctaa

SEQ ID NO: 1426 - DNA, 765 bp, synthetic construct
  source 1..765: mol_type = other DNA; note = HA-NLS-RNF125-(GS)5-OMOMYC nucleic acid
atgtacccatacgatgttccagattacgctccggcggcgaaacgcgtgaaactggatggcagcggcagcggcagcggctccgtgctgagcaccgacagcggcaaatcggcgcccgcctctgccaccgcgcgggccctggagcgcaggagggacccggagttgcccgtcacgtccttcgactgcgccgtgtgccttgaggtgttacaccagcctgtccggacccgctgcggccacgtattctgccgttcctgtattgctaccagtctgaagaacaacaagtggacctgtccttattgccgggcatatcttccttcagaaggagttccagcaactgatgtagccaaaagaatgaaatcagagtataagaactgcgctgagtgtgacaccctggtttgcctcagtgaaatgagggcacatattcggacttgtcagaagtacatagataagtatggaccaggcagcggcagcggcagcggcagcggcagctctgataccgaggaaaatgtcaagcggagaacccacaacgtgctggaaagacagagacggaatgagctgaagcgctccttcttcgccctgcgggaccagatccccgagctggaaaacaacgagaaggcccctaaggtggtgatcctgaaaaaggctacagcctacatcctgagcgtgcaggccgagacccagaaactgatcagcgagatcgacctgctgagaaagcagaacgagcagctgaagcacaagctggaacaactcagaaacagctgcgcctaa

SEQ ID NO: 1427 - DNA, 771 bp, synthetic construct
  source 1..771: mol_type = other DNA; note = HA-NLS-RNF125-(GS)6-OMOMYC nucleic acid
atgtacccatacgatgttccagattacgctccggcggcgaaacgcgtgaaactggatggcagcggcagcggcagcggctccgtgctgagcaccgacagcggcaaatcggcgcccgcctctgccaccgcgcgggccctggagcgcaggagggacccggagttgcccgtcacgtccttcgactgcgccgtgtgccttgaggtgttacaccagcctgtccggacccgctgcggccacgtattctgccgttcctgtattgctaccagtctgaagaacaacaagtggacctgtccttattgccgggcatatcttccttcagaaggagttccagcaactgatgtagccaaaagaatgaaatcagagtataagaactgcgctgagtgtgacaccctggtttgcctcagtgaaatgagggcacatattcggacttgtcagaagtacatagataagtatggaccaggcagcggcagcggcagcggcagcggcagcggcagctctgataccgaggaaaatgtcaagcggagaacccacaacgtgctggaaagacagagacggaatgagctgaagcgctccttcttcgccctgcgggaccagatccccgagctggaaaacaacgagaaggcccctaaggtggtgatcctgaaaaaggctacagcctacatcctgagcgtgcaggccgagacccagaaactgatcagcgagatcgacctgctgagaaagcagaacgagcagctgaagcacaagctggaacaactcagaaacagctgcgcctaa

SEQ ID NO: 1428 - DNA, 1008 bp, synthetic construct
  source 1..1008: mol_type = other DNA; note = OMOMYC-(GS)1-SPOP-NLS nucleic acid
atgtctgataccgaggaaaatgtcaagcggagaacccacaacgtgctggaaagacagagacggaatgagctgaagcgctccttcttcgccctgcgggaccagatccccgagctggaaaacaacgagaaggcccctaaggtggtgatcctgaaaaaggctacagcctacatcctgagcgtgcaggccgagacccagaaactgatcagcgagatcgacctgctgagaaagcagaacgagcagctgaagcacaagctggaacaactcagaaacagctgcgccggcagcaacgggcttctccctgatgacaagcttaccctcttctgcgaggtgagtgttgtgcaagattctgtcaacatttctggccagaataccatgaacatggtaaaggttcctgagtgccggctggcagatgagttaggaggactgtgggagaattcccggttcacagactgctgcttgtgtgttgccggccaggaattccaggctcacaaggctatcttagcagctcgttctccggtttttagtgccatgtttgaacatgaaatggaggagagcaaaaagaatcgagttgaaatcaatgatgtggagcctgaagtttttaaggaaatgatgtgcttcatttacacggggaaggctccaaacctcgacaaaatggctgatgatttgctggcagctgctgacaagtatgccctggagcgcttaaaggtcatgtgtgaggatgccctctgcagtaacctgtccgtggagaacgctgcagaaattctcatcctggccgacctccacagtgcagatcagttgaaaactcaggcagtggatttcatcaactatcatgcttcggatgtcttggagacctctgggtggaagtcaatggtggtgtcacatccccacttggtggctgaggcataccgctctctggcttcagcacagtgcccttttctgggacccccacgcaaacgcctgaagcaatccggcagcggcagcccggcggcgaaacgcgtgaaactggat

SEQ ID NO: 1429 - DNA, 1014 bp, synthetic construct
  source 1..1014: mol_type = other DNA; note = OMOMYC-(GS)2-SPOP-NLS nucleic acid
atgtctgataccgaggaaaatgtcaagcggagaacccacaacgtgctggaaagacagagacggaatgagctgaagcgctccttcttcgccctgcgggaccagatccccgagctggaaaacaacgagaaggcccctaaggtggtgatcctgaaaaaggctacagcctacatcctgagcgtgcaggccgagacccagaaactgatcagcgagatcgacctgctgagaaagcagaacgagcagctgaagcacaagctggaacaactcagaaacagctgcgccggcagcggcagcaacgggcttctccctgatgacaagcttaccctcttctgcgaggtgagtgttgtgcaagattctgtcaacatttctggccagaataccatgaacatggtaaaggttcctgagtgccggctggcagatgagttaggaggactgtgggagaattcccggttcacagactgctgcttgtgtgttgccggccaggaattccaggctcacaaggctatcttagcagctcgttctccggtttttagtgccatgtttgaacatgaaatggaggagagcaaaaagaatcgagttgaaatcaatgatgtggagcctgaagtttttaaggaaatgatgtgcttcatttacacggggaaggctccaaacctcgacaaaatggctgatgatttgctggcagctgctgacaagtatgccctggagcgcttaaaggtcatgtgtgaggatgccctctgcagtaacctgtccgtggagaacgctgcagaaattctcatcctggccgacctccacagtgcagatcagttgaaaactcaggcagtggatttcatcaactatcatgcttcggatgtcttggagacctctgggtggaagtcaatggtggtgtcacatccccacttggtggctgaggcataccgctctctggcttcagcacagtgcccttttctgggacccccacgcaaacgcctgaagcaatccggcagcggcagcccggcggcgaaacgcgtgaaactggat

SEQ ID NO: 1430 - DNA, 1020 bp, synthetic construct
  source 1..1020: mol_type = other DNA; note = OMOMYC-(GS)3-SPOP-NLS nucleic acid
atgtctgataccgaggaaaatgtcaagcggagaacccacaacgtgctggaaagacagagacggaatgagctgaagcgctccttcttcgccctgcgggaccagatccccgagctggaaaacaacgagaaggcccctaaggtggtgatcctgaaaaaggctacagcctacatcctgagcgtgcaggccgagacccagaaactgatcagcgagatcgacctgctgagaaagcagaacgagcagctgaagcacaagctggaacaactcagaaacagctgcgccggcagcggcagcggcagcaacgggcttctccctgatgacaagcttaccctcttctgcgaggtgagtgttgtgcaagattctgtcaacatttctggccagaataccatgaacatggtaaaggttcctgagtgccggctggcagatgagttaggaggactgtgggagaattcccggttcacagactgctgcttgtgtgttgccggccaggaattccaggctcacaaggctatcttagcagctcgttctccggtttttagtgccatgtttgaacatgaaatggaggagagcaaaaagaatcgagttgaaatcaatgatgtggagcctgaagtttttaaggaaatgatgtgcttcatttacacggggaaggctccaaacctcgacaaaatggctgatgatttgctggcagctgctgacaagtatgccctggagcgcttaaaggtcatgtgtgaggatgccctctgcagtaacctgtccgtggagaacgctgcagaaattctcatcctggccgacctccacagtgcagatcagttgaaaactcaggcagtggatttcatcaactatcatgcttcggatgtcttggagacctctgggtggaagtcaatggtggtgtcacatccccacttggtggctgaggcataccgctctctggcttcagcacagtgcccttttctgggacccccacgcaaacgcctgaagcaatccggcagcggcagcccggcggcgaaacgcgtgaaactggat

SEQ ID NO: 1431 - DNA, 1026 bp, synthetic construct
  source 1..1026: mol_type = other DNA; note = OMOMYC-(GS)4-SPOP-NLS nucleic acid
atgtctgataccgaggaaaatgtcaagcggagaacccacaacgtgctggaaagacagagacggaatgagctgaagcgctccttcttcgccctgcgggaccagatccccgagctggaaaacaacgagaaggcccctaaggtggtgatcctgaaaaaggctacagcctacatcctgagcgtgcaggccgagacccagaaactgatcagcgagatcgacctgctgagaaagcagaacgagcagctgaagcacaagctggaacaactcagaaacagctgcgccggcagcggcagcggcagcggcagcaacgggcttctccctgatgacaagcttaccctcttctgcgaggtgagtgttgtgcaagattctgtcaacatttctggccagaataccatgaacatggtaaaggttcctgagtgccggctggcagatgagttaggaggactgtgggagaattcccggttcacagactgctgcttgtgtgttgccggccaggaattccaggctcacaaggctatcttagcagctcgttctccggtttttagtgccatgtttgaacatgaaatggaggagagcaaaaagaatcgagttgaaatcaatgatgtggagcctgaagtttttaaggaaatgatgtgcttcatttacacggggaaggctccaaacctcgacaaaatggctgatgatttgctggcagctgctgacaagtatgccctggagcgcttaaaggtcatgtgtgaggatgccctctgcagtaacctgtccgtggagaacgctgcagaaattctcatcctggccgacctccacagtgcagatcagttgaaaactcaggcagtggatttcatcaactatcatgcttcggatgtcttggagacctctgggtggaagtcaatggtggtgtcacatccccacttggtggctgaggcataccgctctctggcttcagcacagtgcccttttctgggacccccacgcaaacgcctgaagcaatccggcagcggcagcccggcggcgaaacgcgtgaaactggat

SEQ ID NO: 1432 - DNA, 1032 bp, synthetic construct
  source 1..1032: mol_type = other DNA; note = OMOMYC-(GS)5-SPOP-NLS nucleic acid
atgtctgataccgaggaaaatgtcaagcggagaacccacaacgtgctggaaagacagagacggaatgagctgaagcgctccttcttcgccctgcgggaccagatccccgagctggaaaacaacgagaaggcccctaaggtggtgatcctgaaaaaggctacagcctacatcctgagcgtgcaggccgagacccagaaactgatcagcgagatcgacctgctgagaaagcagaacgagcagctgaagcacaagctggaacaactcagaaacagctgcgccggcagcggcagcggcagcggcagcggcagcaacgggcttctccctgatgacaagcttaccctcttctgcgaggtgagtgttgtgcaagattctgtcaacatttctggccagaataccatgaacatggtaaaggttcctgagtgccggctggcagatgagttaggaggactgtgggagaattcccggttcacagactgctgcttgtgtgttgccggccaggaattccaggctcacaaggctatcttagcagctcgttctccggtttttagtgccatgtttgaacatgaaatggaggagagcaaaaagaatcgagttgaaatcaatgatgtggagcctgaagtttttaaggaaatgatgtgcttcatttacacggggaaggctccaaacctcgacaaaatggctgatgatttgctggcagctgctgacaagtatgccctggagcgcttaaaggtcatgtgtgaggatgccctctgcagtaacctgtccgtggagaacgctgcagaaattctcatcctggccgacctccacagtgcagatcagttgaaaactcaggcagtggatttcatcaactatcatgcttcggatgtcttggagacctctgggtggaagtcaatggtggtgtcacatccccacttggtggctgaggcataccgctctctggcttcagcacagtgcccttttctgggacccccacgcaaacgcctgaagcaatccggcagcggcagcccggcggcgaaacgcgtgaaactggat

SEQ ID NO: 1433 - DNA, 1038 bp, synthetic construct
  source 1..1038: mol_type = other DNA; note = OMOMYC-(GS)6-SPOP-NLS nucleic acid
atgtctgataccgaggaaaatgtcaagcggagaacccacaacgtgctggaaagacagagacggaatgagctgaagcgctccttcttcgccctgcgggaccagatccccgagctggaaaacaacgagaaggcccctaaggtggtgatcctgaaaaaggctacagcctacatcctgagcgtgcaggccgagacccagaaactgatcagcgagatcgacctgctgagaaagcagaacgagcagctgaagcacaagctggaacaactcagaaacagctgcgccggcagcggcagcggcagcggcagcggcagcggcagcaacgggcttctccctgatgacaagcttaccctcttctgcgaggtgagtgttgtgcaagattctgtcaacatttctggccagaataccatgaacatggtaaaggttcctgagtgccggctggcagatgagttaggaggactgtgggagaattcccggttcacagactgctgcttgtgtgttgccggccaggaattccaggctcacaaggctatcttagcagctcgttctccggtttttagtgccatgtttgaacatgaaatggaggagagcaaaaagaatcgagttgaaatcaatgatgtggagcctgaagtttttaaggaaatgatgtgcttcatttacacggggaaggctccaaacctcgacaaaatggctgatgatttgctggcagctgctgacaagtatgccctggagcgcttaaaggtcatgtgtgaggatgccctctgcagtaacctgtccgtggagaacgctgcagaaattctcatcctggccgacctccacagtgcagatcagttgaaaactcaggcagtggatttcatcaactatcatgcttcggatgtcttggagacctctgggtggaagtcaatggtggtgtcacatccccacttggtggctgaggcataccgctctctggcttcagcacagtgcccttttctgggacccccacgcaaacgcctgaagcaatccggcagcggcagcccggcggcgaaacgcgtgaaactggat

SEQ ID NO: 1434 - DNA, 1038 bp, synthetic construct
  source 1..1038: mol_type = other DNA; note = OMOMYC-(GS)1-SPOP-NLS-HA nucleic acid
atgtctgataccgaggaaaatgtcaagcggagaacccacaacgtgctggaaagacagagacggaatgagctgaagcgctccttcttcgccctgcgggaccagatccccgagctggaaaacaacgagaaggcccctaaggtggtgatcctgaaaaaggctacagcctacatcctgagcgtgcaggccgagacccagaaactgatcagcgagatcgacctgctgagaaagcagaacgagcagctgaagcacaagctggaacaactcagaaacagctgcgccggcagcaacgggcttctccctgatgacaagcttaccctcttctgcgaggtgagtgttgtgcaagattctgtcaacatttctggccagaataccatgaacatggtaaaggttcctgagtgccggctggcagatgagttaggaggactgtgggagaattcccggttcacagactgctgcttgtgtgttgccggccaggaattccaggctcacaaggctatcttagcagctcgttctccggtttttagtgccatgtttgaacatgaaatggaggagagcaaaaagaatcgagttgaaatcaatgatgtggagcctgaagtttttaaggaaatgatgtgcttcatttacacggggaaggctccaaacctcgacaaaatggctgatgatttgctggcagctgctgacaagtatgccctggagcgcttaaaggtcatgtgtgaggatgccctctgcagtaacctgtccgtggagaacgctgcagaaattctcatcctggccgacctccacagtgcagatcagttgaaaactcaggcagtggatttcatcaactatcatgcttcggatgtcttggagacctctgggtggaagtcaatggtggtgtcacatccccacttggtggctgaggcataccgctctctggcttcagcacagtgcccttttctgggacccccacgcaaacgcctgaagcaatccggcagcggcagcccggcggcgaaacgcgtgaaactggattacccatacgatgttccagattacgcttaa

SEQ ID NO: 1435 - DNA, 1044 bp, synthetic construct
  source 1..1044: mol_type = other DNA; note = OMOMYC-(GS)2-SPOP-NLS-HA nucleic acid
atgtctgataccgaggaaaatgtcaagcggagaacccacaacgtgctggaaagacagagacggaatgagctgaagcgctccttcttcgccctgcgggaccagatccccgagctggaaaacaacgagaaggcccctaaggtggtgatcctgaaaaaggctacagcctacatcctgagcgtgcaggccgagacccagaaactgatcagcgagatcgacctgctgagaaagcagaacgagcagctgaagcacaagctggaacaactcagaaacagctgcgccggcagcggcagcaacgggcttctccctgatgacaagcttaccctcttctgcgaggtgagtgttgtgcaagattctgtcaacatttctggccagaataccatgaacatggtaaaggttcctgagtgccggctggcagatgagttaggaggactgtgggagaattcccggttcacagactgctgcttgtgtgttgccggccaggaattccaggctcacaaggctatcttagcagctcgttctccggtttttagtgccatgtttgaacatgaaatggaggagagcaaaaagaatcgagttgaaatcaatgatgtggagcctgaagtttttaaggaaatgatgtgcttcatttacacggggaaggctccaaacctcgacaaaatggctgatgatttgctggcagctgctgacaagtatgccctggagcgcttaaaggtcatgtgtgaggatgccctctgcagtaacctgtccgtggagaacgctgcagaaattctcatcctggccgacctccacagtgcagatcagttgaaaactcaggcagtggatttcatcaactatcatgcttcggatgtcttggagacctctgggtggaagtcaatggtggtgtcacatccccacttggtggctgaggcataccgctctctggcttcagcacagtgcccttttctgggacccccacgcaaacgcctgaagcaatccggcagcggcagcccggcggcgaaacgcgtgaaactggattacccatacgatgttccagattacgcttaa

SEQ ID NO: 1436 - DNA, 1050 bp, synthetic construct
  source 1..1050: mol_type = other DNA; note = OMOMYC-(GS)3-SPOP-NLS-HA nucleic acid
atgtctgataccgaggaaaatgtcaagcggagaacccacaacgtgctggaaagacagagacggaatgagctgaagcgctccttcttcgccctgcgggaccagatccccgagctggaaaacaacgagaaggcccctaaggtggtgatcctgaaaaaggctacagcctacatcctgagcgtgcaggccgagacccagaaactgatcagcgagatcgacctgctgagaaagcagaacgagcagctgaagcacaagctggaacaactcagaaacagctgcgccggcagcggcagcggcagcaacgggcttctccctgatgacaagcttaccctcttctgcgaggtgagtgttgtgcaagattctgtcaacatttctggccagaataccatgaacatggtaaaggttcctgagtgccggctggcagatgagttaggaggactgtgggagaattcccggttcacagactgctgcttgtgtgttgccggccaggaattccaggctcacaaggctatcttagcagctcgttctccggtttttagtgccatgtttgaacatgaaatggaggagagcaaaaagaatcgagttgaaatcaatgatgtggagcctgaagtttttaaggaaatgatgtgcttcatttacacggggaaggctccaaacctcgacaaaatggctgatgatttgctggcagctgctgacaagtatgccctggagcgcttaaaggtcatgtgtgaggatgccctctgcagtaacctgtccgtggagaacgctgcagaaattctcatcctggccgacctccacagtgcagatcagttgaaaactcaggcagtggatttcatcaactatcatgcttcggatgtcttggagacctctgggtggaagtcaatggtggtgtcacatccccacttggtggctgaggcataccgctctctggcttcagcacagtgcccttttctgggacccccacgcaaacgcctgaagcaatccggcagcggcagcccggcggcgaaacgcgtgaaactggattacccatacgatgttccagattacgcttaa

SEQ ID NO: 1437 - DNA, 1056 bp, synthetic construct
  source 1..1056: mol_type = other DNA; note = OMOMYC-(GS)4-SPOP-NLS-HA nucleic acid
atgtctgataccgaggaaaatgtcaagcggagaacccacaacgtgctggaaagacagagacggaatgagctgaagcgctccttcttcgccctgcgggaccagatccccgagctggaaaacaacgagaaggcccctaaggtggtgatcctgaaaaaggctacagcctacatcctgagcgtgcaggccgagacccagaaactgatcagcgagatcgacctgctgagaaagcagaacgagcagctgaagcacaagctggaacaactcagaaacagctgcgccggcagcggcagcggcagcggcagcaacgggcttctccctgatgacaagcttaccctcttctgcgaggtgagtgttgtgcaagattctgtcaacatttctggccagaataccatgaacatggtaaaggttcctgagtgccggctggcagatgagttaggaggactgtgggagaattcccggttcacagactgctgcttgtgtgttgccggccaggaattccaggctcacaaggctatcttagcagctcgttctccggtttttagtgccatgtttgaacatgaaatggaggagagcaaaaagaatcgagttgaaatcaatgatgtggagcctgaagtttttaaggaaatgatgtgcttcatttacacggggaaggctccaaacctcgacaaaatggctgatgatttgctggcagctgctgacaagtatgccctggagcgcttaaaggtcatgtgtgaggatgccctctgcagtaacctgtccgtggagaacgctgcagaaattctcatcctggccgacctccacagtgcagatcagttgaaaactcaggcagtggatttcatcaactatcatgcttcggatgtcttggagacctctgggtggaagtcaatggtggtgtcacatccccacttggtggctgaggcataccgctctctggcttcagcacagtgcccttttctgggacccccacgcaaacgcctgaagcaatccggcagcggcagcccggcggcgaaacgcgtgaaactggattacccatacgatgttccagattacgcttaa

SEQ ID NO: 1438 - DNA, 1062 bp, synthetic construct
  source 1..1062: mol_type = other DNA; note = OMOMYC-(GS)5-SPOP-NLS-HA nucleic acid
atgtctgataccgaggaaaatgtcaagcggagaacccacaacgtgctggaaagacagagacggaatgagctgaagcgctccttcttcgccctgcgggaccagatccccgagctggaaaacaacgagaaggcccctaaggtggtgatcctgaaaaaggctacagcctacatcctgagcgtgcaggccgagacccagaaactgatcagcgagatcgacctgctgagaaagcagaacgagcagctgaagcacaagctggaacaactcagaaacagctgcgccggcagcggcagcggcagcggcagcggcagcaacgggcttctccctgatgacaagcttaccctcttctgcgaggtgagtgttgtgcaagattctgtcaacatttctggccagaataccatgaacatggtaaaggttcctgagtgccggctggcagatgagttaggaggactgtgggagaattcccggttcacagactgctgcttgtgtgttgccggccaggaattccaggctcacaaggctatcttagcagctcgttctccggtttttagtgccatgtttgaacatgaaatggaggagagcaaaaagaatcgagttgaaatcaatgatgtggagcctgaagtttttaaggaaatgatgtgcttcatttacacggggaaggctccaaacctcgacaaaatggctgatgatttgctggcagctgctgacaagtatgccctggagcgcttaaaggtcatgtgtgaggatgccctctgcagtaacctgtccgtggagaacgctgcagaaattctcatcctggccgacctccacagtgcagatcagttgaaaactcaggcagtggatttcatcaactatcatgcttcggatgtcttggagacctctgggtggaagtcaatggtggtgtcacatccccacttggtggctgaggcataccgctctctggcttcagcacagtgcccttttctgggacccccacgcaaacgcctgaagcaatccggcagcggcagcccggcggcgaaacgcgtgaaactggattacccatacgatgttccagattacgcttaa

SEQ ID NO: 1439 - DNA, 1068 bp, synthetic construct
  source 1..1068: mol_type = other DNA; note = OMOMYC-(GS)6-SPOP-NLS-HA nucleic acid
atgtctgataccgaggaaaatgtcaagcggagaacccacaacgtgctggaaagacagagacggaatgagctgaagcgctccttcttcgccctgcgggaccagatccccgagctggaaaacaacgagaaggcccctaaggtggtgatcctgaaaaaggctacagcctacatcctgagcgtgcaggccgagacccagaaactgatcagcgagatcgacctgctgagaaagcagaacgagcagctgaagcacaagctggaacaactcagaaacagctgcgccggcagcggcagcggcagcggcagcggcagcggcagcaacgggcttctccctgatgacaagcttaccctcttctgcgaggtgagtgttgtgcaagattctgtcaacatttctggccagaataccatgaacatggtaaaggttcctgagtgccggctggcagatgagttaggaggactgtgggagaattcccggttcacagactgctgcttgtgtgttgccggccaggaattccaggctcacaaggctatcttagcagctcgttctccggtttttagtgccatgtttgaacatgaaatggaggagagcaaaaagaatcgagttgaaatcaatgatgtggagcctgaagtttttaaggaaatgatgtgcttcatttacacggggaaggctccaaacctcgacaaaatggctgatgatttgctggcagctgctgacaagtatgccctggagcgcttaaaggtcatgtgtgaggatgccctctgcagtaacctgtccgtggagaacgctgcagaaattctcatcctggccgacctccacagtgcagatcagttgaaaactcaggcagtggatttcatcaactatcatgcttcggatgtcttggagacctctgggtggaagtcaatggtggtgtcacatccccacttggtggctgaggcataccgctctctggcttcagcacagtgcccttttctgggacccccacgcaaacgcctgaagcaatccggcagcggcagcccggcggcgaaacgcgtgaaactggattacccatacgatgttccagattacgcttaa

SEQ ID NO: 1440 - DNA, 837 bp, synthetic construct
  source 1..837: mol_type = other DNA; note = FOXP3DBD-(GS)1-CHIP-NLS nucleic acid
atgcggccccccttcacctacgccacactgatcagatgggccatcctggaagccccagaaaaacagcgcacccttaacgagatctaccactggttcaccagaatgttcgcctttttccggaaccaccctgccacctggaagaacgccattcggcacaacctgtctctgcacaagtgcttcgtgcgggtcgagagcgagaagggagctgtgtggaccgtggacgagctggagttccggaagaagcggagccaaagaccaagcaggggcagccggctgaacttcggggacgacatccccagcgctcttcgaatcgcgaagaagaagcgctggaacagcattgaggagcggcgcatccaccaggagagcgagctgcactcctacctctccaggctcattgccgcggagcgtgagagggagctggaagagtgccagcgaaaccacgagggtgatgaggacgacagccacgtccgggcccagcaggcctgcattgaggccaagcacgacaagtacatggcggacatggacgagcttttttctcaggtggatgagaagaggaagaagcgagacatccccgactacctgtgtggcaagatcagctttgagctgatgcgggagccgtgcatcacgcccagtggcatcacctacgaccgcaaggacatcgaggagcacctgcagcgtgtgggtcattttgacccggtgaccaggagccccctgacccaggaacagctcatccccaacttggctatgaaggaggttattgacgcattcatctctgagaatggctgggtggaggactacggcagcggcagcccggcggcgaaacgcgtgaaactggat

SEQ ID NO: 1441 - DNA, 843 bp, synthetic construct
  source 1..843: mol_type = other DNA; note = FOXP3DBD-(GS)2-CHIP-NLS nucleic acid
atgcggccccccttcacctacgccacactgatcagatgggccatcctggaagccccagaaaaacagcgcacccttaacgagatctaccactggttcaccagaatgttcgcctttttccggaaccaccctgccacctggaagaacgccattcggcacaacctgtctctgcacaagtgcttcgtgcgggtcgagagcgagaagggagctgtgtggaccgtggacgagctggagttccggaagaagcggagccaaagaccaagcaggggcagcggcagccggctgaacttcggggacgacatccccagcgctcttcgaatcgcgaagaagaagcgctggaacagcattgaggagcggcgcatccaccaggagagcgagctgcactcctacctctccaggctcattgccgcggagcgtgagagggagctggaagagtgccagcgaaaccacgagggtgatgaggacgacagccacgtccgggcccagcaggcctgcattgaggccaagcacgacaagtacatggcggacatggacgagcttttttctcaggtggatgagaagaggaagaagcgagacatccccgactacctgtgtggcaagatcagctttgagctgatgcgggagccgtgcatcacgcccagtggcatcacctacgaccgcaaggacatcgaggagcacctgcagcgtgtgggtcattttgacccggtgaccaggagccccctgacccaggaacagctcatccccaacttggctatgaaggaggttattgacgcattcatctctgagaatggctgggtggaggactacggcagcggcagcccggcggcgaaacgcgtgaaactggat

SEQ ID NO: 1442 - DNA, 849 bp, synthetic construct
  source 1..849: mol_type = other DNA; note = FOXP3DBD-(GS)3-CHIP-NLS nucleic acid
atgcggccccccttcacctacgccacactgatcagatgggccatcctggaagccccagaaaaacagcgcacccttaacgagatctaccactggttcaccagaatgttcgcctttttccggaaccaccctgccacctggaagaacgccattcggcacaacctgtctctgcacaagtgcttcgtgcgggtcgagagcgagaagggagctgtgtggaccgtggacgagctggagttccggaagaagcggagccaaagaccaagcaggggcagcggcagcggcagccggctgaacttcggggacgacatccccagcgctcttcgaatcgcgaagaagaagcgctggaacagcattgaggagcggcgcatccaccaggagagcgagctgcactcctacctctccaggctcattgccgcggagcgtgagagggagctggaagagtgccagcgaaaccacgagggtgatgaggacgacagccacgtccgggcccagcaggcctgcattgaggccaagcacgacaagtacatggcggacatggacgagcttttttctcaggtggatgagaagaggaagaagcgagacatccccgactacctgtgtggcaagatcagctttgagctgatgcgggagccgtgcatcacgcccagtggcatcacctacgaccgcaaggacatcgaggagcacctgcagcgtgtgggtcattttgacccggtgaccaggagccccctgacccaggaacagctcatccccaacttggctatgaaggaggttattgacgcattcatctctgagaatggctgggtggaggactacggcagcggcagcccggcggcgaaacgcgtgaaactggat

SEQ ID NO: 1443 - DNA, 855 bp, synthetic construct
  source 1..855: mol_type = other DNA; note = FOXP3DBD-(GS)4-CHIP-NLS nucleic acid
atgcggccccccttcacctacgccacactgatcagatgggccatcctggaagccccagaaaaacagcgcacccttaacgagatctaccactggttcaccagaatgttcgcctttttccggaaccaccctgccacctggaagaacgccattcggcacaacctgtctctgcacaagtgcttcgtgcgggtcgagagcgagaagggagctgtgtggaccgtggacgagctggagttccggaagaagcggagccaaagaccaagcaggggcagcggcagcggcagcggcagccggctgaacttcggggacgacatccccagcgctcttcgaatcgcgaagaagaagcgctggaacagcattgaggagcggcgcatccaccaggagagcgagctgcactcctacctctccaggctcattgccgcggagcgtgagagggagctggaagagtgccagcgaaaccacgagggtgatgaggacgacagccacgtccgggcccagcaggcctgcattgaggccaagcacgacaagtacatggcggacatggacgagcttttttctcaggtggatgagaagaggaagaagcgagacatccccgactacctgtgtggcaagatcagctttgagctgatgcgggagccgtgcatcacgcccagtggcatcacctacgaccgcaaggacatcgaggagcacctgcagcgtgtgggtcattttgacccggtgaccaggagccccctgacccaggaacagctcatccccaacttggctatgaaggaggttattgacgcattcatctctgagaatggctgggtggaggactacggcagcggcagcccggcggcgaaacgcgtgaaactggat

SEQ ID NO: 1444 - DNA, 861 bp, synthetic construct
  source 1..861: mol_type = other DNA; note = FOXP3DBD-(GS)5-CHIP-NLS nucleic acid
atgcggccccccttcacctacgccacactgatcagatgggccatcctggaagccccagaaaaacagcgcacccttaacgagatctaccactggttcaccagaatgttcgcctttttccggaaccaccctgccacctggaagaacgccattcggcacaacctgtctctgcacaagtgcttcgtgcgggtcgagagcgagaagggagctgtgtggaccgtggacgagctggagttccggaagaagcggagccaaagaccaagcaggggcagcggcagcggcagcggcagcggcagccggctgaacttcggggacgacatccccagcgctcttcgaatcgcgaagaagaagcgctggaacagcattgaggagcggcgcatccaccaggagagcgagctgcactcctacctctccaggctcattgccgcggagcgtgagagggagctggaagagtgccagcgaaaccacgagggtgatgaggacgacagccacgtccgggcccagcaggcctgcattgaggccaagcacgacaagtacatggcggacatggacgagcttttttctcaggtggatgagaagaggaagaagcgagacatccccgactacctgtgtggcaagatcagctttgagctgatgcgggagccgtgcatcacgcccagtggcatcacctacgaccgcaaggacatcgaggagcacctgcagcgtgtgggtcattttgacccggtgaccaggagccccctgacccaggaacagctcatccccaacttggctatgaaggaggttattgacgcattcatctctgagaatggctgggtggaggactacggcagcggcagcccggcggcgaaacgcgtgaaactggat

SEQ ID NO: 1445 - DNA, 867 bp, synthetic construct
  source 1..867: mol_type = other DNA; note = FOXP3DBD-(GS)6-CHIP-NLS nucleic acid
atgcggccccccttcacctacgccacactgatcagatgggccatcctggaagccccagaaaaacagcgcacccttaacgagatctaccactggttcaccagaatgttcgcctttttccggaaccaccctgccacctggaagaacgccattcggcacaacctgtctctgcacaagtgcttcgtgcgggtcgagagcgagaagggagctgtgtggaccgtggacgagctggagttccggaagaagcggagccaaagaccaagcaggggcagcggcagcggcagcggcagcggcagcggcagccggctgaacttcggggacgacatccccagcgctcttcgaatcgcgaagaagaagcgctggaacagcattgaggagcggcgcatccaccaggagagcgagctgcactcctacctctccaggctcattgccgcggagcgtgagagggagctggaagagtgccagcgaaaccacgagggtgatgaggacgacagccacgtccgggcccagcaggcctgcattgaggccaagcacgacaagtacatggcggacatggacgagcttttttctcaggtggatgagaagaggaagaagcgagacatccccgactacctgtgtggcaagatcagctttgagctgatgcgggagccgtgcatcacgcccagtggcatcacctacgaccgcaaggacatcgaggagcacctgcagcgtgtgggtcattttgacccggtgaccaggagccccctgacccaggaacagctcatccccaacttggctatgaaggaggttattgacgcattcatctctgagaatggctgggtggaggactacggcagcggcagcccggcggcgaaacgcgtgaaactggat

SEQ ID NO: 1446 - DNA, 867 bp, synthetic construct
  source 1..867: mol_type = other DNA; note = FOXP3DBD-(GS)1-CHIP-NLS-HA nucleic acid
atgcggccccccttcacctacgccacactgatcagatgggccatcctggaagccccagaaaaacagcgcacccttaacgagatctaccactggttcaccagaatgttcgcctttttccggaaccaccctgccacctggaagaacgccattcggcacaacctgtctctgcacaagtgcttcgtgcgggtcgagagcgagaagggagctgtgtggaccgtggacgagctggagttccggaagaagcggagccaaagaccaagcaggggcagccggctgaacttcggggacgacatccccagcgctcttcgaatcgcgaagaagaagcgctggaacagcattgaggagcggcgcatccaccaggagagcgagctgcactcctacctctccaggctcattgccgcggagcgtgagagggagctggaagagtgccagcgaaaccacgagggtgatgaggacgacagccacgtccgggcccagcaggcctgcattgaggccaagcacgacaagtacatggcggacatggacgagcttttttctcaggtggatgagaagaggaagaagcgagacatccccgactacctgtgtggcaagatcagctttgagctgatgcgggagccgtgcatcacgcccagtggcatcacctacgaccgcaaggacatcgaggagcacctgcagcgtgtgggtcattttgacccggtgaccaggagccccctgacccaggaacagctcatccccaacttggctatgaaggaggttattgacgcattcatctctgagaatggctgggtggaggactacggcagcggcagcccggcggcgaaacgcgtgaaactggattacccatacgatgttccagattacgcttaa

SEQ ID NO: 1447 - DNA, 873 bp, synthetic construct
  source 1..873: mol_type = other DNA; note = FOXP3DBD-(GS)2-CHIP-NLS-HA nucleic acid
atgcggccccccttcacctacgccacactgatcagatgggccatcctggaagccccagaaaaacagcgcacccttaacgagatctaccactggttcaccagaatgttcgcctttttccggaaccaccctgccacctggaagaacgccattcggcacaacctgtctctgcacaagtgcttcgtgcgggtcgagagcgagaagggagctgtgtggaccgtggacgagctggagttccggaagaagcggagccaaagaccaagcaggggcagcggcagccggctgaacttcggggacgacatccccagcgctcttcgaatcgcgaagaagaagcgctggaacagcattgaggagcggcgcatccaccaggagagcgagctgcactcctacctctccaggctcattgccgcggagcgtgagagggagctggaagagtgccagcgaaaccacgagggtgatgaggacgacagccacgtccgggcccagcaggcctgcattgaggccaagcacgacaagtacatggcggacatggacgagcttttttctcaggtggatgagaagaggaagaagcgagacatccccgactacctgtgtggcaagatcagctttgagctgatgcgggagccgtgcatcacgcccagtggcatcacctacgaccgcaaggacatcgaggagcacctgcagcgtgtgggtcattttgacccggtgaccaggagccccctgacccaggaacagctcatccccaacttggctatgaaggaggttattgacgcattcatctctgagaatggctgggtggaggactacggcagcggcagcccggcggcgaaacgcgtgaaactggattacccatacgatgttccagattacgcttaa

SEQ ID NO: 1448 - DNA, 879 bp, synthetic construct
  source 1..879: mol_type = other DNA; note = FOXP3DBD-(GS)3-CHIP-NLS-HA nucleic acid
atgcggccccccttcacctacgccacactgatcagatgggccatcctggaagccccagaaaaacagcgcacccttaacgagatctaccactggttcaccagaatgttcgcctttttccggaaccaccctgccacctggaagaacgccattcggcacaacctgtctctgcacaagtgcttcgtgcgggtcgagagcgagaagggagctgtgtggaccgtggacgagctggagttccggaagaagcggagccaaagaccaagcaggggcagcggcagcggcagccggctgaacttcggggacgacatccccagcgctcttcgaatcgcgaagaagaagcgctggaacagcattgaggagcggcgcatccaccaggagagcgagctgcactcctacctctccaggctcattgccgcggagcgtgagagggagctggaagagtgccagcgaaaccacgagggtgatgaggacgacagccacgtccgggcccagcaggcctgcattgaggccaagcacgacaagtacatggcggacatggacgagcttttttctcaggtggatgagaagaggaagaagcgagacatccccgactacctgtgtggcaagatcagctttgagctgatgcgggagccgtgcatcacgcccagtggcatcacctacgaccgcaaggacatcgaggagcacctgcagcgtgtgggtcattttgacccggtgaccaggagccccctgacccaggaacagctcatccccaacttggctatgaaggaggttattgacgcattcatctctgagaatggctgggtggaggactacggcagcggcagcccggcggcgaaacgcgtgaaactggattacccatacgatgttccagattacgcttaa

SEQ ID NO: 1449 - DNA, 885 bp, synthetic construct
  source 1..885: mol_type = other DNA; note = FOXP3DBD-(GS)4-CHIP-NLS-HA nucleic acid
atgcggccccccttcacctacgccacactgatcagatgggccatcctggaagccccagaaaaacagcgcacccttaacgagatctaccactggttcaccagaatgttcgcctttttccggaaccaccctgccacctggaagaacgccattcggcacaacctgtctctgcacaagtgcttcgtgcgggtcgagagcgagaagggagctgtgtggaccgtggacgagctggagttccggaagaagcggagccaaagaccaagcaggggcagcggcagcggcagcggcagccggctgaacttcggggacgacatccccagcgctcttcgaatcgcgaagaagaagcgctggaacagcattgaggagcggcgcatccaccaggagagcgagctgcactcctacctctccaggctcattgccgcggagcgtgagagggagctggaagagtgccagcgaaaccacgagggtgatgaggacgacagccacgtccgggcccagcaggcctgcattgaggccaagcacgacaagtacatggcggacatggacgagcttttttctcaggtggatgagaagaggaagaagcgagacatccccgactacctgtgtggcaagatcagctttgagctgatgcgggagccgtgcatcacgcccagtggcatcacctacgaccgcaaggacatcgaggagcacctgcagcgtgtgggtcattttgacccggtgaccaggagccccctgacccaggaacagctcatccccaacttggctatgaaggaggttattgacgcattcatctctgagaatggctgggtggaggactacggcagcggcagcccggcggcgaaacgcgtgaaactggattacccatacgatgttccagattacgcttaa

SEQ ID NO: 1450 - DNA, 891 bp, synthetic construct
  source 1..891: mol_type = other DNA; note = FOXP3DBD-(GS)5-CHIP-NLS-HA nucleic acid
atgcggccccccttcacctacgccacactgatcagatgggccatcctggaagccccagaaaaacagcgcacccttaacgagatctaccactggttcaccagaatgttcgcctttttccggaaccaccctgccacctggaagaacgccattcggcacaacctgtctctgcacaagtgcttcgtgcgggtcgagagcgagaagggagctgtgtggaccgtggacgagctggagttccggaagaagcggagccaaagaccaagcaggggcagcggcagcggcagcggcagcggcagccggctgaacttcggggacgacatccccagcgctcttcgaatcgcgaagaagaagcgctggaacagcattgaggagcggcgcatccaccaggagagcgagctgcactcctacctctccaggctcattgccgcggagcgtgagagggagctggaagagtgccagcgaaaccacgagggtgatgaggacgacagccacgtccgggcccagcaggcctgcattgaggccaagcacgacaagtacatggcggacatggacgagcttttttctcaggtggatgagaagaggaagaagcgagacatccccgactacctgtgtggcaagatcagctttgagctgatgcgggagccgtgcatcacgcccagtggcatcacctacgaccgcaaggacatcgaggagcacctgcagcgtgtgggtcattttgacccggtgaccaggagccccctgacccaggaacagctcatccccaacttggctatgaaggaggttattgacgcattcatctctgagaatggctgggtggaggactacggcagcggcagcccggcggcgaaacgcgtgaaactggattacccatacgatgttccagattacgcttaa

SEQ ID NO: 1451 - DNA, 897 bp, synthetic construct
  source 1..897: mol_type = other DNA; note = FOXP3DBD-(GS)6-CHIP-NLS-HA nucleic acid
atgcggccccccttcacctacgccacactgatcagatgggccatcctggaagccccagaaaaacagcgcacccttaacgagatctaccactggttcaccagaatgttcgcctttttccggaaccaccctgccacctggaagaacgccattcggcacaacctgtctctgcacaagtgcttcgtgcgggtcgagagcgagaagggagctgtgtggaccgtggacgagctggagttccggaagaagcggagccaaagaccaagcaggggcagcggcagcggcagcggcagcggcagcggcagccggctgaacttcggggacgacatccccagcgctcttcgaatcgcgaagaagaagcgctggaacagcattgaggagcggcgcatccaccaggagagcgagctgcactcctacctctccaggctcattgccgcggagcgtgagagggagctggaagagtgccagcgaaaccacgagggtgatgaggacgacagccacgtccgggcccagcaggcctgcattgaggccaagcacgacaagtacatggcggacatggacgagcttttttctcaggtggatgagaagaggaagaagcgagacatccccgactacctgtgtggcaagatcagctttgagctgatgcgggagccgtgcatcacgcccagtggcatcacctacgaccgcaaggacatcgaggagcacctgcagcgtgtgggtcattttgacccggtgaccaggagccccctgacccaggaacagctcatccccaacttggctatgaaggaggttattgacgcattcatctctgagaatggctgggtggaggactacggcagcggcagcccggcggcgaaacgcgtgaaactggattacccatacgatgttccagattacgcttaa

SEQ ID NO: 1452 - DNA, 420 bp, synthetic construct
  source 1..420: mol_type = other DNA; note = NLS-DCAF1-(GS)1-FOXP3DBD nucleic acid
ccggcggcgaaacgcgtgaaactggatggcagcggcagcggcagccaggcgccgattaactttaccagccgcctgaaccgccgcgcgagctttccgaaatatggcggcgtggatggcggctgctttgatcgccatctgatttttagccgcggcagccggccccccttcacctacgccacactgatcagatgggccatcctggaagccccagaaaaacagcgcacccttaacgagatctaccactggttcaccagaatgttcgcctttttccggaaccaccctgccacctggaagaacgccattcggcacaacctgtctctgcacaagtgcttcgtgcgggtcgagagcgagaagggagctgtgtggaccgtggacgagctggagttccggaagaagcggagccaaagaccaagcaggtaa

SEQ ID NO: 1453 - DNA, 426 bp, synthetic construct
  source 1..426: mol_type = other DNA; note = NLS-DCAF1-(GS)2-FOXP3DBD nucleic acid
ccggcggcgaaacgcgtgaaactggatggcagcggcagcggcagccaggcgccgattaactttaccagccgcctgaaccgccgcgcgagctttccgaaatatggcggcgtggatggcggctgctttgatcgccatctgatttttagccgcggcagcggcagccggccccccttcacctacgccacactgatcagatgggccatcctggaagccccagaaaaacagcgcacccttaacgagatctaccactggttcaccagaatgttcgcctttttccggaaccaccctgccacctggaagaacgccattcggcacaacctgtctctgcacaagtgcttcgtgcgggtcgagagcgagaagggagctgtgtggaccgtggacgagctggagttccggaagaagcggagccaaagaccaagcaggtaa

SEQ ID NO: 1454 - DNA, 432 bp, synthetic construct
  source 1..432: mol_type = other DNA; note = NLS-DCAF1-(GS)3-FOXP3DBD nucleic acid
ccggcggcgaaacgcgtgaaactggatggcagcggcagcggcagccaggcgccgattaactttaccagccgcctgaaccgccgcgcgagctttccgaaatatggcggcgtggatggcggctgctttgatcgccatctgatttttagccgcggcagcggcagcggcagccggccccccttcacctacgccacactgatcagatgggccatcctggaagccccagaaaaacagcgcacccttaacgagatctaccactggttcaccagaatgttcgcctttttccggaaccaccctgccacctggaagaacgccattcggcacaacctgtctctgcacaagtgcttcgtgcgggtcgagagcgagaagggagctgtgtggaccgtggacgagctggagttccggaagaagcggagccaaagaccaagcaggtaa

SEQ ID NO: 1455 - DNA, 438 bp, synthetic construct
  source 1..438: mol_type = other DNA; note = NLS-DCAF1-(GS)4-FOXP3DBD nucleic acid
ccggcggcgaaacgcgtgaaactggatggcagcggcagcggcagccaggcgccgattaactttaccagccgcctgaaccgccgcgcgagctttccgaaatatggcggcgtggatggcggctgctttgatcgccatctgatttttagccgcggcagcggcagcggcagcggcagccggccccccttcacctacgccacactgatcagatgggccatcctggaagccccagaaaaacagcgcacccttaacgagatctaccactggttcaccagaatgttcgcctttttccggaaccaccctgccacctggaagaacgccattcggcacaacctgtctctgcacaagtgcttcgtgcgggtcgagagcgagaagggagctgtgtggaccgtggacgagctggagttccggaagaagcggagccaaagaccaagcaggtaa

SEQ ID NO: 1456 - DNA, 444 bp, synthetic construct
  source 1..444: mol_type = other DNA; note = NLS-DCAF1-(GS)5-FOXP3DBD nucleic acid
ccggcggcgaaacgcgtgaaactggatggcagcggcagcggcagccaggcgccgattaactttaccagccgcctgaaccgccgcgcgagctttccgaaatatggcggcgtggatggcggctgctttgatcgccatctgatttttagccgcggcagcggcagcggcagcggcagcggcagccggccccccttcacctacgccacactgatcagatgggccatcctggaagccccagaaaaacagcgcacccttaacgagatctaccactggttcaccagaatgttcgcctttttccggaaccaccctgccacctggaagaacgccattcggcacaacctgtctctgcacaagtgcttcgtgcgggtcgagagcgagaagggagctgtgtggaccgtggacgagctggagttccggaagaagcggagccaaagaccaagcaggtaa

SEQ ID NO: 1457 - DNA, 450 bp, synthetic construct
  source 1..450: mol_type = other DNA; note = NLS-DCAF1-(GS)6-FOXP3DBD nucleic acid
ccggcggcgaaacgcgtgaaactggatggcagcggcagcggcagccaggcgccgattaactttaccagccgcctgaaccgccgcgcgagctttccgaaatatggcggcgtggatggcggctgctttgatcgccatctgatttttagccgcggcagcggcagcggcagcggcagcggcagcggcagccggccccccttcacctacgccacactgatcagatgggccatcctggaagccccagaaaaacagcgcacccttaacgagatctaccactggttcaccagaatgttcgcctttttccggaaccaccctgccacctggaagaacgccattcggcacaacctgtctctgcacaagtgcttcgtgcgggtcgagagcgagaagggagctgtgtggaccgtggacgagctggagttccggaagaagcggagccaaagaccaagcaggtaa

SEQ ID NO: 1458 - DNA, 450 bp, synthetic construct
  source 1..450: mol_type = other DNA; note = HA-NLS-DCAF1-(GS)1-FOXP3DBD nucleic acid
atgtacccatacgatgttccagattacgctccggcggcgaaacgcgtgaaactggatggcagcggcagcggcagccaggcgccgattaactttaccagccgcctgaaccgccgcgcgagctttccgaaatatggcggcgtggatggcggctgctttgatcgccatctgatttttagccgcggcagccggccccccttcacctacgccacactgatcagatgggccatcctggaagccccagaaaaacagcgcacccttaacgagatctaccactggttcaccagaatgttcgcctttttccggaaccaccctgccacctggaagaacgccattcggcacaacctgtctctgcacaagtgcttcgtgcgggtcgagagcgagaagggagctgtgtggaccgtggacgagctggagttccggaagaagcggagccaaagaccaagcaggtaa

SEQ ID NO: 1459 - DNA, 456 bp, synthetic construct
  source 1..456: mol_type = other DNA; note = HA-NLS-DCAF1-(GS)2-FOXP3DBD nucleic acid
atgtacccatacgatgttccagattacgctccggcggcgaaacgcgtgaaactggatggcagcggcagcggcagccaggcgccgattaactttaccagccgcctgaaccgccgcgcgagctttccgaaatatggcggcgtggatggcggctgctttgatcgccatctgatttttagccgcggcagcggcagccggccccccttcacctacgccacactgatcagatgggccatcctggaagccccagaaaaacagcgcacccttaacgagatctaccactggttcaccagaatgttcgcctttttccggaaccaccctgccacctggaagaacgccattcggcacaacctgtctctgcacaagtgcttcgtgcgggtcgagagcgagaagggagctgtgtggaccgtggacgagctggagttccggaagaagcggagccaaagaccaagcaggtaa

SEQ ID NO: 1460 - DNA, 462 bp, synthetic construct
  source 1..462: mol_type = other DNA; note = HA-NLS-DCAF1-(GS)3-FOXP3DBD nucleic acid
atgtacccatacgatgttccagattacgctccggcggcgaaacgcgtgaaactggatggcagcggcagcggcagccaggcgccgattaactttaccagccgcctgaaccgccgcgcgagctttccgaaatatggcggcgtggatggcggctgctttgatcgccatctgatttttagccgcggcagcggcagcggcagccggccccccttcacctacgccacactgatcagatgggccatcctggaagccccagaaaaacagcgcacccttaacgagatctaccactggttcaccagaatgttcgcctttttccggaaccaccctgccacctggaagaacgccattcggcacaacctgtctctgcacaagtgcttcgtgcgggtcgagagcgagaagggagctgtgtggaccgtggacgagctggagttccggaagaagcggagccaaagaccaagcaggtaa

SEQ ID NO: 1461 - DNA, 468 bp, synthetic construct
  source 1..468: mol_type = other DNA; note = HA-NLS-DCAF1-(GS)4-FOXP3DBD nucleic acid
atgtacccatacgatgttccagattacgctccggcggcgaaacgcgtgaaactggatggcagcggcagcggcagccaggcgccgattaactttaccagccgcctgaaccgccgcgcgagctttccgaaatatggcggcgtggatggcggctgctttgatcgccatctgatttttagccgcggcagcggcagcggcagcggcagccggccccccttcacctacgccacactgatcagatgggccatcctggaagccccagaaaaacagcgcacccttaacgagatctaccactggttcaccagaatgttcgcctttttccggaaccaccctgccacctggaagaacgccattcggcacaacctgtctctgcacaagtgcttcgtgcgggtcgagagcgagaagggagctgtgtggaccgtggacgagctggagttccggaagaagcggagccaaagaccaagcaggtaa

SEQ ID NO: 1462 - DNA, 474 bp, synthetic construct
  source 1..474: mol_type = other DNA; note = HA-NLS-DCAF1-(GS)5-FOXP3DBD nucleic acid
atgtacccatacgatgttccagattacgctccggcggcgaaacgcgtgaaactggatggcagcggcagcggcagccaggcgccgattaactttaccagccgcctgaaccgccgcgcgagctttccgaaatatggcggcgtggatggcggctgctttgatcgccatctgatttttagccgcggcagcggcagcggcagcggcagcggcagccggccccccttcacctacgccacactgatcagatgggccatcctggaagccccagaaaaacagcgcacccttaacgagatctaccactggttcaccagaatgttcgcctttttccggaaccaccctgccacctggaagaacgccattcggcacaacctgtctctgcacaagtgcttcgtgcgggtcgagagcgagaagggagctgtgtggaccgtggacgagctggagttccggaagaagcggagccaaagaccaagcaggtaa

SEQ ID NO: 1463 - DNA, 480 bp, synthetic construct
  source 1..480: mol_type = other DNA; note = HA-NLS-DCAF1-(GS)6-FOXP3DBD nucleic acid
atgtacccatacgatgttccagattacgctccggcggcgaaacgcgtgaaactggatggcagcggcagcggcagccaggcgccgattaactttaccagccgcctgaaccgccgcgcgagctttccgaaatatggcggcgtggatggcggctgctttgatcgccatctgatttttagccgcggcagcggcagcggcagcggcagcggcagcggcagccggccccccttcacctacgccacactgatcagatgggccatcctggaagccccagaaaaacagcgcacccttaacgagatctaccactggttcaccagaatgttcgcctttttccggaaccaccctgccacctggaagaacgccattcggcacaacctgtctctgcacaagtgcttcgtgcgggtcgagagcgagaagggagctgtgtggaccgtggacgagctggagttccggaagaagcggagccaaagaccaagcaggtaa

SEQ ID NO: 1464 - DNA, 1383 bp, synthetic construct
  source 1..1383: mol_type = other DNA; note = NLS-FOXP3DBD-(GS)1-E6AP nucleic acid
ccggcggcgaaacgcgtgaaactggatggcagcggcagcggcagccggccccccttcacctacgccacactgatcagatgggccatcctggaagccccagaaaaacagcgcacccttaacgagatctaccactggttcaccagaatgttcgcctttttccggaaccaccctgccacctggaagaacgccattcggcacaacctgtctctgcacaagtgcttcgtgcgggtcgagagcgagaagggagctgtgtggaccgtggacgagctggagttccggaagaagcggagccaaagaccaagcaggggcagcaatccatatttgagactcaaagttagacgtgaccatatcatagatgatgcacttgtccggctagagatgatcgctatggaaaatcctgcagacttgaagaagcagttgtatgtggaatttgaaggagaacaaggagttgatgagggaggtgtttccaaagaattttttcagctggttgtggaggaaatcttcaatccagatattggtatgttcacatacgatgaatctacaaaattgttttggtttaatccatcttcttttgaaactgagggtcagtttactctgattggcatagtactgggtctggctatttacaataactgtatactggatgtacattttcccatggttgtctacaggaagctaatggggaaaaaaggaacttttcgtgacttgggagactctcacccagttctatatcagagtttaaaagatttattggagtatgaagggaatgtggaagatgacatgatgatcactttccagatatcacagacagatctttttggtaacccaatgatgtatgatctaaaggaaaatggtgataaaattccaattacaaatgaaaacaggaaggaatttgtcaatctttattctgactacattctcaataaatcagtagaaaaacagttcaaggcttttcggagaggttttcatatggtgaccaatgaatctcccttaaagtacttattcagaccagaagaaattgaattgcttatatgtggaagccggaatctagatttccaagcactagaagaaactacagaatatgacggtggctataccagggactctgttctgattagggagttctgggaaatcgttcattcatttacagatgaacagaaaagactcttcttgcagtttacaacgggcacagacagagcacctgtgggaggactaggaaaattaaagatgattatagccaaaaatggcccagacacagaaaggttacctacatctcatacttgctttaatgtgcttttacttccggaatactcaagcaaagaaaaacttaaagagagattgttgaaggccatcacgtatgccaaaggatttggcatgctgtaa

SEQ ID NO: 1465 - DNA, 1389 bp, synthetic construct
  source 1..1389: mol_type = other DNA; note = NLS-FOXP3DBD-(GS)2-E6AP nucleic acid
ccggcggcgaaacgcgtgaaactggatggcagcggcagcggcagccggccccccttcacctacgccacactgatcagatgggccatcctggaagccccagaaaaacagcgcacccttaacgagatctaccactggttcaccagaatgttcgcctttttccggaaccaccctgccacctggaagaacgccattcggcacaacctgtctctgcacaagtgcttcgtgcgggtcgagagcgagaagggagctgtgtggaccgtggacgagctggagttccggaagaagcggagccaaagaccaagcaggggcagcggcagcaatccatatttgagactcaaagttagacgtgaccatatcatagatgatgcacttgtccggctagagatgatcgctatggaaaatcctgcagacttgaagaagcagttgtatgtggaatttgaaggagaacaaggagttgatgagggaggtgtttccaaagaattttttcagctggttgtggaggaaatcttcaatccagatattggtatgttcacatacgatgaatctacaaaattgttttggtttaatccatcttcttttgaaactgagggtcagtttactctgattggcatagtactgggtctggctatttacaataactgtatactggatgtacattttcccatggttgtctacaggaagctaatggggaaaaaaggaacttttcgtgacttgggagactctcacccagttctatatcagagtttaaaagatttattggagtatgaagggaatgtggaagatgacatgatgatcactttccagatatcacagacagatctttttggtaacccaatgatgtatgatctaaaggaaaatggtgataaaattccaattacaaatgaaaacaggaaggaatttgtcaatctttattctgactacattctcaataaatcagtagaaaaacagttcaaggcttttcggagaggttttcatatggtgaccaatgaatctcccttaaagtacttattcagaccagaagaaattgaattgcttatatgtggaagccggaatctagatttccaagcactagaagaaactacagaatatgacggtggctataccagggactctgttctgattagggagttctgggaaatcgttcattcatttacagatgaacagaaaagactcttcttgcagtttacaacgggcacagacagagcacctgtgggaggactaggaaaattaaagatgattatagccaaaaatggcccagacacagaaaggttacctacatctcatacttgctttaatgtgcttttacttccggaatactcaagcaaagaaaaacttaaagagagattgttgaaggccatcacgtatgccaaaggatttggcatgctgtaa

SEQ ID NO: 1466 - DNA, 1395 bp, synthetic construct
  source 1..1395: mol_type = other DNA; note = NLS-FOXP3DBD-(GS)3-E6AP nucleic acid
ccggcggcgaaacgcgtgaaactggatggcagcggcagcggcagccggccccccttcacctacgccacactgatcagatgggccatcctggaagccccagaaaaacagcgcacccttaacgagatctaccactggttcaccagaatgttcgcctttttccggaaccaccctgccacctggaagaacgccattcggcacaacctgtctctgcacaagtgcttcgtgcgggtcgagagcgagaagggagctgtgtggaccgtggacgagctggagttccggaagaagcggagccaaagaccaagcaggggcagcggcagcggcagcaatccatatttgagactcaaagttagacgtgaccatatcatagatgatgcacttgtccggctagagatgatcgctatggaaaatcctgcagacttgaagaagcagttgtatgtggaatttgaaggagaacaaggagttgatgagggaggtgtttccaaagaattttttcagctggttgtggaggaaatcttcaatccagatattggtatgttcacatacgatgaatctacaaaattgttttggtttaatccatcttcttttgaaactgagggtcagtttactctgattggcatagtactgggtctggctatttacaataactgtatactggatgtacattttcccatggttgtctacaggaagctaatggggaaaaaaggaacttttcgtgacttgggagactctcacccagttctatatcagagtttaaaagatttattggagtatgaagggaatgtggaagatgacatgatgatcactttccagatatcacagacagatctttttggtaacccaatgatgtatgatctaaaggaaaatggtgataaaattccaattacaaatgaaaacaggaaggaatttgtcaatctttattctgactacattctcaataaatcagtagaaaaacagttcaaggcttttcggagaggttttcatatggtgaccaatgaatctcccttaaagtacttattcagaccagaagaaattgaattgcttatatgtggaagccggaatctagatttccaagcactagaagaaactacagaatatgacggtggctataccagggactctgttctgattagggagttctgggaaatcgttcattcatttacagatgaacagaaaagactcttcttgcagtttacaacgggcacagacagagcacctgtgggaggactaggaaaattaaagatgattatagccaaaaatggcccagacacagaaaggttacctacatctcatacttgctttaatgtgcttttacttccggaatactcaagcaaagaaaaacttaaagagagattgttgaaggccatcacgtatgccaaaggatttggcatgctgtaa

SEQ ID NO: 1467 - DNA, 1401 bp, synthetic construct
  source 1..1401: mol_type = other DNA; note = NLS-FOXP3DBD-(GS)4-E6AP nucleic acid
ccggcggcgaaacgcgtgaaactggatggcagcggcagcggcagccggccccccttcacctacgccacactgatcagatgggccatcctggaagccccagaaaaacagcgcacccttaacgagatctaccactggttcaccagaatgttcgcctttttccggaaccaccctgccacctggaagaacgccattcggcacaacctgtctctgcacaagtgcttcgtgcgggtcgagagcgagaagggagctgtgtggaccgtggacgagctggagttccggaagaagcggagccaaagaccaagcaggggcagcggcagcggcagcggcagcaatccatatttgagactcaaagttagacgtgaccatatcatagatgatgcacttgtccggctagagatgatcgctatggaaaatcctgcagacttgaagaagcagttgtatgtggaatttgaaggagaacaaggagttgatgagggaggtgtttccaaagaattttttcagctggttgtggaggaaatcttcaatccagatattggtatgttcacatacgatgaatctacaaaattgttttggtttaatccatcttcttttgaaactgagggtcagtttactctgattggcatagtactgggtctggctatttacaataactgtatactggatgtacattttcccatggttgtctacaggaagctaatggggaaaaaaggaacttttcgtgacttgggagactctcacccagttctatatcagagtttaaaagatttattggagtatgaagggaatgtggaagatgacatgatgatcactttccagatatcacagacagatctttttggtaacccaatgatgtatgatctaaaggaaaatggtgataaaattccaattacaaatgaaaacaggaaggaatttgtcaatctttattctgactacattctcaataaatcagtagaaaaacagttcaaggcttttcggagaggttttcatatggtgaccaatgaatctcccttaaagtacttattcagaccagaagaaattgaattgcttatatgtggaagccggaatctagatttccaagcactagaagaaactacagaatatgacggtggctataccagggactctgttctgattagggagttctgggaaatcgttcattcatttacagatgaacagaaaagactcttcttgcagtttacaacgggcacagacagagcacctgtgggaggactaggaaaattaaagatgattatagccaaaaatggcccagacacagaaaggttacctacatctcatacttgctttaatgtgcttttacttccggaatactcaagcaaagaaaaacttaaagagagattgttgaaggccatcacgtatgccaaaggatttggcatgctgtaa

SEQ ID NO: 1468 - DNA, 1407 bp, synthetic construct
  source 1..1407: mol_type = other DNA; note = NLS-FOXP3DBD-(GS)5-E6AP nucleic acid
ccggcggcgaaacgcgtgaaactggatggcagcggcagcggcagccggccccccttcacctacgccacactgatcagatgggccatcctggaagccccagaaaaacagcgcacccttaacgagatctaccactggttcaccagaatgttcgcctttttccggaaccaccctgccacctggaagaacgccattcggcacaacctgtctctgcacaagtgcttcgtgcgggtcgagagcgagaagggagctgtgtggaccgtggacgagctggagttccggaagaagcggagccaaagaccaagcaggggcagcggcagcggcagcggcagcggcagcaatccatatttgagactcaaagttagacgtgaccatatcatagatgatgcacttgtccggctagagatgatcgctatggaaaatcctgcagacttgaagaagcagttgtatgtggaatttgaaggagaacaaggagttgatgagggaggtgtttccaaagaattttttcagctggttgtggaggaaatcttcaatccagatattggtatgttcacatacgatgaatctacaaaattgttttggtttaatccatcttcttttgaaactgagggtcagtttactctgattggcatagtactgggtctggctatttacaataactgtatactggatgtacattttcccatggttgtctacaggaagctaatggggaaaaaaggaacttttcgtgacttgggagactctcacccagttctatatcagagtttaaaagatttattggagtatgaagggaatgtggaagatgacatgatgatcactttccagatatcacagacagatctttttggtaacccaatgatgtatgatctaaaggaaaatggtgataaaattccaattacaaatgaaaacaggaaggaatttgtcaatctttattctgactacattctcaataaatcagtagaaaaacagttcaaggcttttcggagaggttttcatatggtgaccaatgaatctcccttaaagtacttattcagaccagaagaaattgaattgcttatatgtggaagccggaatctagatttccaagcactagaagaaactacagaatatgacggtggctataccagggactctgttctgattagggagttctgggaaatcgttcattcatttacagatgaacagaaaagactcttcttgcagtttacaacgggcacagacagagcacctgtgggaggactaggaaaattaaagatgattatagccaaaaatggcccagacacagaaaggttacctacatctcatacttgctttaatgtgcttttacttccggaatactcaagcaaagaaaaacttaaagagagattgttgaaggccatcacgtatgccaaaggatttggcatgctgtaa

SEQ ID NO: 1469 - DNA, 1413 bp, synthetic construct
  source 1..1413: mol_type = other DNA; note = NLS-FOXP3DBD-(GS)6-E6AP nucleic acid
ccggcggcgaaacgcgtgaaactggatggcagcggcagcggcagccggccccccttcacctacgccacactgatcagatgggccatcctggaagccccagaaaaacagcgcacccttaacgagatctaccactggttcaccagaatgttcgcctttttccggaaccaccctgccacctggaagaacgccattcggcacaacctgtctctgcacaagtgcttcgtgcgggtcgagagcgagaagggagctgtgtggaccgtggacgagctggagttccggaagaagcggagccaaagaccaagcaggggcagcggcagcggcagcggcagcggcagcggcagcaatccatatttgagactcaaagttagacgtgaccatatcatagatgatgcacttgtccggctagagatgatcgctatggaaaatcctgcagacttgaagaagcagttgtatgtggaatttgaaggagaacaaggagttgatgagggaggtgtttccaaagaattttttcagctggttgtggaggaaatcttcaatccagatattggtatgttcacatacgatgaatctacaaaattgttttggtttaatccatcttcttttgaaactgagggtcagtttactctgattggcatagtactgggtctggctatttacaataactgtatactggatgtacattttcccatggttgtctacaggaagctaatggggaaaaaaggaacttttcgtgacttgggagactctcacccagttctatatcagagtttaaaagatttattggagtatgaagggaatgtggaagatgacatgatgatcactttccagatatcacagacagatctttttggtaacccaatgatgtatgatctaaaggaaaatggtgataaaattccaattacaaatgaaaacaggaaggaatttgtcaatctttattctgactacattctcaataaatcagtagaaaaacagttcaaggcttttcggagaggttttcatatggtgaccaatgaatctcccttaaagtacttattcagaccagaagaaattgaattgcttatatgtggaagccggaatctagatttccaagcactagaagaaactacagaatatgacggtggctataccagggactctgttctgattagggagttctgggaaatcgttcattcatttacagatgaacagaaaagactcttcttgcagtttacaacgggcacagacagagcacctgtgggaggactaggaaaattaaagatgattatagccaaaaatggcccagacacagaaaggttacctacatctcatacttgctttaatgtgcttttacttccggaatactcaagcaaagaaaaacttaaagagagattgttgaaggccatcacgtatgccaaaggatttggcatgctgtaa

SEQ ID NO: 1470 - DNA, 1413 bp, synthetic construct
  source 1..1413: mol_type = other DNA; note = HA-NLS-FOXP3DBD-(GS)1-E6AP nucleic acid
atgtacccatacgatgttccagattacgctccggcggcgaaacgcgtgaaactggatggcagcggcagcggcagccggccccccttcacctacgccacactgatcagatgggccatcctggaagccccagaaaaacagcgcacccttaacgagatctaccactggttcaccagaatgttcgcctttttccggaaccaccctgccacctggaagaacgccattcggcacaacctgtctctgcacaagtgcttcgtgcgggtcgagagcgagaagggagctgtgtggaccgtggacgagctggagttccggaagaagcggagccaaagaccaagcaggggcagcaatccatatttgagactcaaagttagacgtgaccatatcatagatgatgcacttgtccggctagagatgatcgctatggaaaatcctgcagacttgaagaagcagttgtatgtggaatttgaaggagaacaaggagttgatgagggaggtgtttccaaagaattttttcagctggttgtggaggaaatcttcaatccagatattggtatgttcacatacgatgaatctacaaaattgttttggtttaatccatcttcttttgaaactgagggtcagtttactctgattggcatagtactgggtctggctatttacaataactgtatactggatgtacattttcccatggttgtctacaggaagctaatggggaaaaaaggaacttttcgtgacttgggagactctcacccagttctatatcagagtttaaaagatttattggagtatgaagggaatgtggaagatgacatgatgatcactttccagatatcacagacagatctttttggtaacccaatgatgtatgatctaaaggaaaatggtgataaaattccaattacaaatgaaaacaggaaggaatttgtcaatctttattctgactacattctcaataaatcagtagaaaaacagttcaaggcttttcggagaggttttcatatggtgaccaatgaatctcccttaaagtacttattcagaccagaagaaattgaattgcttatatgtggaagccggaatctagatttccaagcactagaagaaactacagaatatgacggtggctataccagggactctgttctgattagggagttctgggaaatcgttcattcatttacagatgaacagaaaagactcttcttgcagtttacaacgggcacagacagagcacctgtgggaggactaggaaaattaaagatgattatagccaaaaatggcccagacacagaaaggttacctacatctcatacttgctttaatgtgcttttacttccggaatactcaagcaaagaaaaacttaaagagagattgttgaaggccatcacgtatgccaaaggatttggcatgctgtaa

SEQ ID NO: 1471 - DNA, 1419 bp, synthetic construct
  source 1..1419: mol_type = other DNA; note = HA-NLS-FOXP3DBD-(GS)2-E6AP nucleic acid
atgtacccatacgatgttccagattacgctccggcggcgaaacgcgtgaaactggatggcagcggcagcggcagccggccccccttcacctacgccacactgatcagatgggccatcctggaagccccagaaaaacagcgcacccttaacgagatctaccactggttcaccagaatgttcgcctttttccggaaccaccctgccacctggaagaacgccattcggcacaacctgtctctgcacaagtgcttcgtgcgggtcgagagcgagaagggagctgtgtggaccgtggacgagctggagttccggaagaagcggagccaaagaccaagcaggggcagcggcagcaatccatatttgagactcaaagttagacgtgaccatatcatagatgatgcacttgtccggctagagatgatcgctatggaaaatcctgcagacttgaagaagcagttgtatgtggaatttgaaggagaacaaggagttgatgagggaggtgtttccaaagaattttttcagctggttgtggaggaaatcttcaatccagatattggtatgttcacatacgatgaatctacaaaattgttttggtttaatccatcttcttttgaaactgagggtcagtttactctgattggcatagtactgggtctggctatttacaataactgtatactggatgtacattttcccatggttgtctacaggaagctaatggggaaaaaaggaacttttcgtgacttgggagactctcacccagttctatatcagagtttaaaagatttattggagtatgaagggaatgtggaagatgacatgatgatcactttccagatatcacagacagatctttttggtaacccaatgatgtatgatctaaaggaaaatggtgataaaattccaattacaaatgaaaacaggaaggaatttgtcaatctttattctgactacattctcaataaatcagtagaaaaacagttcaaggcttttcggagaggttttcatatggtgaccaatgaatctcccttaaagtacttattcagaccagaagaaattgaattgcttatatgtggaagccggaatctagatttccaagcactagaagaaactacagaatatgacggtggctataccagggactctgttctgattagggagttctgggaaatcgttcattcatttacagatgaacagaaaagactcttcttgcagtttacaacgggcacagacagagcacctgtgggaggactaggaaaattaaagatgattatagccaaaaatggcccagacacagaaaggttacctacatctcatacttgctttaatgtgcttttacttccggaatactcaagcaaagaaaaacttaaagagagattgttgaaggccatcacgtatgccaaaggatttggcatgctgtaa

SEQ ID NO: 1472 - DNA, 1425 bp, synthetic construct
  source 1..1425: mol_type = other DNA; note = HA-NLS-FOXP3DBD-(GS)3-E6AP nucleic acid
atgtacccatacgatgttccagattacgctccggcggcgaaacgcgtgaaactggatggcagcggcagcggcagccggccccccttcacctacgccacactgatcagatgggccatcctggaagccccagaaaaacagcgcacccttaacgagatctaccactggttcaccagaatgttcgcctttttccggaaccaccctgccacctggaagaacgccattcggcacaacctgtctctgcacaagtgcttcgtgcgggtcgagagcgagaagggagctgtgtggaccgtggacgagctggagttccggaagaagcggagccaaagaccaagcaggggcagcggcagcggcagcaatccatatttgagactcaaagttagacgtgaccatatcatagatgatgcacttgtccggctagagatgatcgctatggaaaatcctgcagacttgaagaagcagttgtatgtggaatttgaaggagaacaaggagttgatgagggaggtgtttccaaagaattttttcagctggttgtggaggaaatcttcaatccagatattggtatgttcacatacgatgaatctacaaaattgttttggtttaatccatcttcttttgaaactgagggtcagtttactctgattggcatagtactgggtctggctatttacaataactgtatactggatgtacattttcccatggttgtctacaggaagctaatggggaaaaaaggaacttttcgtgacttgggagactctcacccagttctatatcagagtttaaaagatttattggagtatgaagggaatgtggaagatgacatgatgatcactttccagatatcacagacagatctttttggtaacccaatgatgtatgatctaaaggaaaatggtgataaaattccaattacaaatgaaaacaggaaggaatttgtcaatctttattctgactacattctcaataaatcagtagaaaaacagttcaaggcttttcggagaggttttcatatggtgaccaatgaatctcccttaaagtacttattcagaccagaagaaattgaattgcttatatgtggaagccggaatctagatttccaagcactagaagaaactacagaatatgacggtggctataccagggactctgttctgattagggagttctgggaaatcgttcattcatttacagatgaacagaaaagactcttcttgcagtttacaacgggcacagacagagcacctgtgggaggactaggaaaattaaagatgattatagccaaaaatggcccagacacagaaaggttacctacatctcatacttgctttaatgtgcttttacttccggaatactcaagcaaagaaaaacttaaagagagattgttgaaggccatcacgtatgccaaaggatttggcatgctgtaa

SEQ ID NO: 1473 - DNA, 1431 bp, synthetic construct
  source 1..1431: mol_type = other DNA; note = HA-NLS-FOXP3DBD-(GS)4-E6AP nucleic acid
atgtacccatacgatgttccagattacgctccggcggcgaaacgcgtgaaactggatggcagcggcagcggcagccggccccccttcacctacgccacactgatcagatgggccatcctggaagccccagaaaaacagcgcacccttaacgagatctaccactggttcaccagaatgttcgcctttttccggaaccaccctgccacctggaagaacgccattcggcacaacctgtctctgcacaagtgcttcgtgcgggtcgagagcgagaagggagctgtgtggaccgtggacgagctggagttccggaagaagcggagccaaagaccaagcaggggcagcggcagcggcagcggcagcaatccatatttgagactcaaagttagacgtgaccatatcatagatgatgcacttgtccggctagagatgatcgctatggaaaatcctgcagacttgaagaagcagttgtatgtggaatttgaaggagaacaaggagttgatgagggaggtgtttccaaagaattttttcagctggttgtggaggaaatcttcaatccagatattggtatgttcacatacgatgaatctacaaaattgttttggtttaatccatcttcttttgaaactgagggtcagtttactctgattggcatagtactgggtctggctatttacaataactgtatactggatgtacattttcccatggttgtctacaggaagctaatggggaaaaaaggaacttttcgtgacttgggagactctcacccagttctatatcagagtttaaaagatttattggagtatgaagggaatgtggaagatgacatgatgatcactttccagatatcacagacagatctttttggtaacccaatgatgtatgatctaaaggaaaatggtgataaaattccaattacaaatgaaaacaggaaggaatttgtcaatctttattctgactacattctcaataaatcagtagaaaaacagttcaaggcttttcggagaggttttcatatggtgaccaatgaatctcccttaaagtacttattcagaccagaagaaattgaattgcttatatgtggaagccggaatctagatttccaagcactagaagaaactacagaatatgacggtggctataccagggactctgttctgattagggagttctgggaaatcgttcattcatttacagatgaacagaaaagactcttcttgcagtttacaacgggcacagacagagcacctgtgggaggactaggaaaattaaagatgattatagccaaaaatggcccagacacagaaaggttacctacatctcatacttgctttaatgtgcttttacttccggaatactcaagcaaagaaaaacttaaagagagattgttgaaggccatcacgtatgccaaaggatttggcatgctgtaa

SEQ ID NO: 1474 - DNA, 1437 bp, synthetic construct
  source 1..1437: mol_type = other DNA; note = HA-NLS-FOXP3DBD-(GS)5-E6AP nucleic acid
atgtacccatacgatgttccagattacgctccggcggcgaaacgcgtgaaactggatggcagcggcagcggcagccggccccccttcacctacgccacactgatcagatgggccatcctggaagccccagaaaaacagcgcacccttaacgagatctaccactggttcaccagaatgttcgcctttttccggaaccaccctgccacctggaagaacgccattcggcacaacctgtctctgcacaagtgcttcgtgcgggtcgagagcgagaagggagctgtgtggaccgtggacgagctggagttccggaagaagcggagccaaagaccaagcaggggcagcggcagcggcagcggcagcggcagcaatccatatttgagactcaaagttagacgtgaccatatcatagatgatgcacttgtccggctagagatgatcgctatggaaaatcctgcagacttgaagaagcagttgtatgtggaatttgaaggagaacaaggagttgatgagggaggtgtttccaaagaattttttcagctggttgtggaggaaatcttcaatccagatattggtatgttcacatacgatgaatctacaaaattgttttggtttaatccatcttcttttgaaactgagggtcagtttactctgattggcatagtactgggtctggctatttacaataactgtatactggatgtacattttcccatggttgtctacaggaagctaatggggaaaaaaggaacttttcgtgacttgggagactctcacccagttctatatcagagtttaaaagatttattggagtatgaagggaatgtggaagatgacatgatgatcactttccagatatcacagacagatctttttggtaacccaatgatgtatgatctaaaggaaaatggtgataaaattccaattacaaatgaaaacaggaaggaatttgtcaatctttattctgactacattctcaataaatcagtagaaaaacagttcaaggcttttcggagaggttttcatatggtgaccaatgaatctcccttaaagtacttattcagaccagaagaaattgaattgcttatatgtggaagccggaatctagatttccaagcactagaagaaactacagaatatgacggtggctataccagggactctgttctgattagggagttctgggaaatcgttcattcatttacagatgaacagaaaagactcttcttgcagtttacaacgggcacagacagagcacctgtgggaggactaggaaaattaaagatgattatagccaaaaatggcccagacacagaaaggttacctacatctcatacttgctttaatgtgcttttacttccggaatactcaagcaaagaaaaacttaaagagagattgttgaaggccatcacgtatgccaaaggatttggcatgctgtaa

SEQ ID NO: 1475 - DNA, 1443 bp, synthetic construct
  source 1..1443: mol_type = other DNA; note = HA-NLS-FOXP3DBD-(GS)6-E6AP nucleic acid
atgtacccatacgatgttccagattacgctccggcggcgaaacgcgtgaaactggatggcagcggcagcggcagccggccccccttcacctacgccacactgatcagatgggccatcctggaagccccagaaaaacagcgcacccttaacgagatctaccactggttcaccagaatgttcgcctttttccggaaccaccctgccacctggaagaacgccattcggcacaacctgtctctgcacaagtgcttcgtgcgggtcgagagcgagaagggagctgtgtggaccgtggacgagctggagttccggaagaagcggagccaaagaccaagcaggggcagcggcagcggcagcggcagcggcagcggcagcaatccatatttgagactcaaagttagacgtgaccatatcatagatgatgcacttgtccggctagagatgatcgctatggaaaatcctgcagacttgaagaagcagttgtatgtggaatttgaaggagaacaaggagttgatgagggaggtgtttccaaagaattttttcagctggttgtggaggaaatcttcaatccagatattggtatgttcacatacgatgaatctacaaaattgttttggtttaatccatcttcttttgaaactgagggtcagtttactctgattggcatagtactgggtctggctatttacaataactgtatactggatgtacattttcccatggttgtctacaggaagctaatggggaaaaaaggaacttttcgtgacttgggagactctcacccagttctatatcagagtttaaaagatttattggagtatgaagggaatgtggaagatgacatgatgatcactttccagatatcacagacagatctttttggtaacccaatgatgtatgatctaaaggaaaatggtgataaaattccaattacaaatgaaaacaggaaggaatttgtcaatctttattctgactacattctcaataaatcagtagaaaaacagttcaaggcttttcggagaggttttcatatggtgaccaatgaatctcccttaaagtacttattcagaccagaagaaattgaattgcttatatgtggaagccggaatctagatttccaagcactagaagaaactacagaatatgacggtggctataccagggactctgttctgattagggagttctgggaaatcgttcattcatttacagatgaacagaaaagactcttcttgcagtttacaacgggcacagacagagcacctgtgggaggactaggaaaattaaagatgattatagccaaaaatggcccagacacagaaaggttacctacatctcatacttgctttaatgtgcttttacttccggaatactcaagcaaagaaaaacttaaagagagattgttgaaggccatcacgtatgccaaaggatttggcatgctgtaa

SEQ ID NO: 1476 - DNA, 1371 bp, synthetic construct
  source 1..1371: mol_type = other DNA; note = FBXW7a-(GS)1-FOXP3DBD nucleic acid
aatcaggaactgctctctgtgggcagcaaaagacgacgaactggaggctctctgagaggtaacccttcctcaagccaggtagatgaagaacagatgaatcgtgtggtagaggaggaacagcaacagcaactcagacaacaagaggaggagcacactgcaaggaatggtgaagttgttggagtagaacctagacctggaggccaaaatgattcccagcaaggacagttggaagaaaacaataatagatttatttcggtagatgaggactcctcaggaaaccaagaagaacaagaggaagatgaagaacatgctggtgaacaagatgaggaggatgaggaggaggaggagatggaccaggagagtgacgattttgatcagtctgatgatagtagcagagaagatgaacatacacatactaacagtgtcacgaactccagtagtattgtggacctgcccgttcaccaactctcctccccattctatacaaaaacaacaaaaatgaaaagaaagttggaccatggttctgaggtccgctctttttctttgggaaagaaaccatgcaaagtctcagaatatacaagtaccactgggcttgtaccatgttcagcaacaccaacaacttttggggacctcagagcagccaatggccaagggcaacaacgacgccgaattacatctgtccagccacctacaggcctccaggaatggctaaaaatgtttcagagctggagtggaccagagaaattgcttgctttagatgaactcattgatagttgtgaaccaacacaagtaaaacatatgatgcaagtgatagaaccccagtttcaacgagacttcatttcattgctccctaaagagttggcactctatgtgctttcattcctggaacccaaagacctgctacaagcagctcagacatgtcgctactggagaattttggctgaagacaaccttctctggagagagaaatgcaaagaagaggggattgatgaaccattgcacatcaagagaagaaaagtaataaaaccaggtttcatacacagtccatggaaaagtgcatacatcagacagcacagaattgatactaactcgaggcgaggaggcagccggccccccttcacctacgccacactgatcagatgggccatcctggaagccccagaaaaacagcgcacccttaacgagatctaccactggttcaccagaatgttcgcctttttccggaaccaccctgccacctggaagaacgccattcggcacaacctgtctctgcacaagtgcttcgtgcgggtcgagagcgagaagggagctgtgtggaccgtggacgagctggagttccggaagaagcggagccaaagaccaagcaggtaa

SEQ ID NO: 1477 - DNA, 1377 bp, synthetic construct
  source 1..1377: mol_type = other DNA; note = FBXW7a-(GS)2-FOXP3DBD nucleic acid
aatcaggaactgctctctgtgggcagcaaaagacgacgaactggaggctctctgagaggtaacccttcctcaagccaggtagatgaagaacagatgaatcgtgtggtagaggaggaacagcaacagcaactcagacaacaagaggaggagcacactgcaaggaatggtgaagttgttggagtagaacctagacctggaggccaaaatgattcccagcaaggacagttggaagaaaacaataatagatttatttcggtagatgaggactcctcaggaaaccaagaagaacaagaggaagatgaagaacatgctggtgaacaagatgaggaggatgaggaggaggaggagatggaccaggagagtgacgattttgatcagtctgatgatagtagcagagaagatgaacatacacatactaacagtgtcacgaactccagtagtattgtggacctgcccgttcaccaactctcctccccattctatacaaaaacaacaaaaatgaaaagaaagttggaccatggttctgaggtccgctctttttctttgggaaagaaaccatgcaaagtctcagaatatacaagtaccactgggcttgtaccatgttcagcaacaccaacaacttttggggacctcagagcagccaatggccaagggcaacaacgacgccgaattacatctgtccagccacctacaggcctccaggaatggctaaaaatgtttcagagctggagtggaccagagaaattgcttgctttagatgaactcattgatagttgtgaaccaacacaagtaaaacatatgatgcaagtgatagaaccccagtttcaacgagacttcatttcattgctccctaaagagttggcactctatgtgctttcattcctggaacccaaagacctgctacaagcagctcagacatgtcgctactggagaattttggctgaagacaaccttctctggagagagaaatgcaaagaagaggggattgatgaaccattgcacatcaagagaagaaaagtaataaaaccaggtttcatacacagtccatggaaaagtgcatacatcagacagcacagaattgatactaactcgaggcgaggaggcagcggcagccggccccccttcacctacgccacactgatcagatgggccatcctggaagccccagaaaaacagcgcacccttaacgagatctaccactggttcaccagaatgttcgcctttttccggaaccaccctgccacctggaagaacgccattcggcacaacctgtctctgcacaagtgcttcgtgcgggtcgagagcgagaagggagctgtgtggaccgtggacgagctggagttccggaagaagcggagccaaagaccaagcaggtaa

SEQ ID NO: 1478 - DNA, 1383 bp, synthetic construct
  source 1..1383: mol_type = other DNA; note = FBXW7a-(GS)3-FOXP3DBD nucleic acid
aatcaggaactgctctctgtgggcagcaaaagacgacgaactggaggctctctgagaggtaacccttcctcaagccaggtagatgaagaacagatgaatcgtgtggtagaggaggaacagcaacagcaactcagacaacaagaggaggagcacactgcaaggaatggtgaagttgttggagtagaacctagacctggaggccaaaatgattcccagcaaggacagttggaagaaaacaataatagatttatttcggtagatgaggactcctcaggaaaccaagaagaacaagaggaagatgaagaacatgctggtgaacaagatgaggaggatgaggaggaggaggagatggaccaggagagtgacgattttgatcagtctgatgatagtagcagagaagatgaacatacacatactaacagtgtcacgaactccagtagtattgtggacctgcccgttcaccaactctcctccccattctatacaaaaacaacaaaaatgaaaagaaagttggaccatggttctgaggtccgctctttttctttgggaaagaaaccatgcaaagtctcagaatatacaagtaccactgggcttgtaccatgttcagcaacaccaacaacttttggggacctcagagcagccaatggccaagggcaacaacgacgccgaattacatctgtccagccacctacaggcctccaggaatggctaaaaatgtttcagagctggagtggaccagagaaattgcttgctttagatgaactcattgatagttgtgaaccaacacaagtaaaacatatgatgcaagtgatagaaccccagtttcaacgagacttcatttcattgctccctaaagagttggcactctatgtgctttcattcctggaacccaaagacctgctacaagcagctcagacatgtcgctactggagaattttggctgaagacaaccttctctggagagagaaatgcaaagaagaggggattgatgaaccattgcacatcaagagaagaaaagtaataaaaccaggtttcatacacagtccatggaaaagtgcatacatcagacagcacagaattgatactaactcgaggcgaggaggcagcggcagcggcagccggccccccttcacctacgccacactgatcagatgggccatcctggaagccccagaaaaacagcgcacccttaacgagatctaccactggttcaccagaatgttcgcctttttccggaaccaccctgccacctggaagaacgccattcggcacaacctgtctctgcacaagtgcttcgtgcgggtcgagagcgagaagggagctgtgtggaccgtggacgagctggagttccggaagaagcggagccaaagaccaagcaggtaa

SEQ ID NO: 1479 - DNA, 1389 bp, synthetic construct
  source 1..1389: mol_type = other DNA; note = FBXW7a-(GS)4-FOXP3DBD nucleic acid
aatcaggaactgctctctgtgggcagcaaaagacgacgaactggaggctctctgagaggtaacccttcctcaagccaggtagatgaagaacagatgaatcgtgtggtagaggaggaacagcaacagcaactcagacaacaagaggaggagcacactgcaaggaatggtgaagttgttggagtagaacctagacctggaggccaaaatgattcccagcaaggacagttggaagaaaacaataatagatttatttcggtagatgaggactcctcaggaaaccaagaagaacaagaggaagatgaagaacatgctggtgaacaagatgaggaggatgaggaggaggaggagatggaccaggagagtgacgattttgatcagtctgatgatagtagcagagaagatgaacatacacatactaacagtgtcacgaactccagtagtattgtggacctgcccgttcaccaactctcctccccattctatacaaaaacaacaaaaatgaaaagaaagttggaccatggttctgaggtccgctctttttctttgggaaagaaaccatgcaaagtctcagaatatacaagtaccactgggcttgtaccatgttcagcaacaccaacaacttttggggacctcagagcagccaatggccaagggcaacaacgacgccgaattacatctgtccagccacctacaggcctccaggaatggctaaaaatgtttcagagctggagtggaccagagaaattgcttgctttagatgaactcattgatagttgtgaaccaacacaagtaaaacatatgatgcaagtgatagaaccccagtttcaacgagacttcatttcattgctccctaaagagttggcactctatgtgctttcattcctggaacccaaagacctgctacaagcagctcagacatgtcgctactggagaattttggctgaagacaaccttctctggagagagaaatgcaaagaagaggggattgatgaaccattgcacatcaagagaagaaaagtaataaaaccaggtttcatacacagtccatggaaaagtgcatacatcagacagcacagaattgatactaactcgaggcgaggaggcagcggcagcggcagcggcagccggccccccttcacctacgccacactgatcagatgggccatcctggaagccccagaaaaacagcgcacccttaacgagatctaccactggttcaccagaatgttcgcctttttccggaaccaccctgccacctggaagaacgccattcggcacaacctgtctctgcacaagtgcttcgtgcgggtcgagagcgagaagggagctgtgtggaccgtggacgagctggagttccggaagaagcggagccaaagaccaagcaggtaa

SEQ ID NO: 1480 - DNA, 1395 bp, synthetic construct
  source 1..1395: mol_type = other DNA; note = FBXW7a-(GS)5-FOXP3DBD nucleic acid
aatcaggaactgctctctgtgggcagcaaaagacgacgaactggaggctctctgagaggtaacccttcctcaagccaggtagatgaagaacagatgaatcgtgtggtagaggaggaacagcaacagcaactcagacaacaagaggaggagcacactgcaaggaatggtgaagttgttggagtagaacctagacctggaggccaaaatgattcccagcaaggacagttggaagaaaacaataatagatttatttcggtagatgaggactcctcaggaaaccaagaagaacaagaggaagatgaagaacatgctggtgaacaagatgaggaggatgaggaggaggaggagatggaccaggagagtgacgattttgatcagtctgatgatagtagcagagaagatgaacatacacatactaacagtgtcacgaactccagtagtattgtggacctgcccgttcaccaactctcctccccattctatacaaaaacaacaaaaatgaaaagaaagttggaccatggttctgaggtccgctctttttctttgggaaagaaaccatgcaaagtctcagaatatacaagtaccactgggcttgtaccatgttcagcaacaccaacaacttttggggacctcagagcagccaatggccaagggcaacaacgacgccgaattacatctgtccagccacctacaggcctccaggaatggctaaaaatgtttcagagctggagtggaccagagaaattgcttgctttagatgaactcattgatagttgtgaaccaacacaagtaaaacatatgatgcaagtgatagaaccccagtttcaacgagacttcatttcattgctccctaaagagttggcactctatgtgctttcattcctggaacccaaagacctgctacaagcagctcagacatgtcgctactggagaattttggctgaagacaaccttctctggagagagaaatgcaaagaagaggggattgatgaaccattgcacatcaagagaagaaaagtaataaaaccaggtttcatacacagtccatggaaaagtgcatacatcagacagcacagaattgatactaactcgaggcgaggaggcagcggcagcggcagcggcagcggcagccggccccccttcacctacgccacactgatcagatgggccatcctggaagccccagaaaaacagcgcacccttaacgagatctaccactggttcaccagaatgttcgcctttttccggaaccaccctgccacctggaagaacgccattcggcacaacctgtctctgcacaagtgcttcgtgcgggtcgagagcgagaagggagctgtgtggaccgtggacgagctggagttccggaagaagcggagccaaagaccaagcaggtaa

SEQ ID NO: 1481 - DNA, 1401 bp, synthetic construct
  source 1..1401: mol_type = other DNA; note = FBXW7a-(GS)6-FOXP3DBD nucleic acid
aatcaggaactgctctctgtgggcagcaaaagacgacgaactggaggctctctgagaggtaacccttcctcaagccaggtagatgaagaacagatgaatcgtgtggtagaggaggaacagcaacagcaactcagacaacaagaggaggagcacactgcaaggaatggtgaagttgttggagtagaacctagacctggaggccaaaatgattcccagcaaggacagttggaagaaaacaataatagatttatttcggtagatgaggactcctcaggaaaccaagaagaacaagaggaagatgaagaacatgctggtgaacaagatgaggaggatgaggaggaggaggagatggaccaggagagtgacgattttgatcagtctgatgatagtagcagagaagatgaacatacacatactaacagtgtcacgaactccagtagtattgtggacctgcccgttcaccaactctcctccccattctatacaaaaacaacaaaaatgaaaagaaagttggaccatggttctgaggtccgctctttttctttgggaaagaaaccatgcaaagtctcagaatatacaagtaccactgggcttgtaccatgttcagcaacaccaacaacttttggggacctcagagcagccaatggccaagggcaacaacgacgccgaattacatctgtccagccacctacaggcctccaggaatggctaaaaatgtttcagagctggagtggaccagagaaattgcttgctttagatgaactcattgatagttgtgaaccaacacaagtaaaacatatgatgcaagtgatagaaccccagtttcaacgagacttcatttcattgctccctaaagagttggcactctatgtgctttcattcctggaacccaaagacctgctacaagcagctcagacatgtcgctactggagaattttggctgaagacaaccttctctggagagagaaatgcaaagaagaggggattgatgaaccattgcacatcaagagaagaaaagtaataaaaccaggtttcatacacagtccatggaaaagtgcatacatcagacagcacagaattgatactaactcgaggcgaggaggcagcggcagcggcagcggcagcggcagcggcagccggccccccttcacctacgccacactgatcagatgggccatcctggaagccccagaaaaacagcgcacccttaacgagatctaccactggttcaccagaatgttcgcctttttccggaaccaccctgccacctggaagaacgccattcggcacaacctgtctctgcacaagtgcttcgtgcgggtcgagagcgagaagggagctgtgtggaccgtggacgagctggagttccggaagaagcggagccaaagaccaagcaggtaa

SEQ ID NO: 1482 - DNA, 1401 bp, synthetic construct
  source 1..1401: mol_type = other DNA; note = HA-FBXW7a-(GS)1-FOXP3DBD nucleic acid
atgtacccatacgatgttccagattacgctaatcaggaactgctctctgtgggcagcaaaagacgacgaactggaggctctctgagaggtaacccttcctcaagccaggtagatgaagaacagatgaatcgtgtggtagaggaggaacagcaacagcaactcagacaacaagaggaggagcacactgcaaggaatggtgaagttgttggagtagaacctagacctggaggccaaaatgattcccagcaaggacagttggaagaaaacaataatagatttatttcggtagatgaggactcctcaggaaaccaagaagaacaagaggaagatgaagaacatgctggtgaacaagatgaggaggatgaggaggaggaggagatggaccaggagagtgacgattttgatcagtctgatgatagtagcagagaagatgaacatacacatactaacagtgtcacgaactccagtagtattgtggacctgcccgttcaccaactctcctccccattctatacaaaaacaacaaaaatgaaaagaaagttggaccatggttctgaggtccgctctttttctttgggaaagaaaccatgcaaagtctcagaatatacaagtaccactgggcttgtaccatgttcagcaacaccaacaacttttggggacctcagagcagccaatggccaagggcaacaacgacgccgaattacatctgtccagccacctacaggcctccaggaatggctaaaaatgtttcagagctggagtggaccagagaaattgcttgctttagatgaactcattgatagttgtgaaccaacacaagtaaaacatatgatgcaagtgatagaaccccagtttcaacgagacttcatttcattgctccctaaagagttggcactctatgtgctttcattcctggaacccaaagacctgctacaagcagctcagacatgtcgctactggagaattttggctgaagacaaccttctctggagagagaaatgcaaagaagaggggattgatgaaccattgcacatcaagagaagaaaagtaataaaaccaggtttcatacacagtccatggaaaagtgcatacatcagacagcacagaattgatactaactcgaggcgaggaggcagccggccccccttcacctacgccacactgatcagatgggccatcctggaagccccagaaaaacagcgcacccttaacgagatctaccactggttcaccagaatgttcgcctttttccggaaccaccctgccacctggaagaacgccattcggcacaacctgtctctgcacaagtgcttcgtgcgggtcgagagcgagaagggagctgtgtggaccgtggacgagctggagttccggaagaagcggagccaaagaccaagcaggtaa

SEQ ID NO: 1483 - DNA, 1407 bp, synthetic construct
  source 1..1407: mol_type = other DNA; note = HA-FBXW7a-(GS)2-FOXP3DBD nucleic acid
atgtacccatacgatgttccagattacgctaatcaggaactgctctctgtgggcagcaaaagacgacgaactggaggctctctgagaggtaacccttcctcaagccaggtagatgaagaacagatgaatcgtgtggtagaggaggaacagcaacagcaactcagacaacaagaggaggagcacactgcaaggaatggtgaagttgttggagtagaacctagacctggaggccaaaatgattcccagcaaggacagttggaagaaaacaataatagatttatttcggtagatgaggactcctcaggaaaccaagaagaacaagaggaagatgaagaacatgctggtgaacaagatgaggaggatgaggaggaggaggagatggaccaggagagtgacgattttgatcagtctgatgatagtagcagagaagatgaacatacacatactaacagtgtcacgaactccagtagtattgtggacctgcccgttcaccaactctcctccccattctatacaaaaacaacaaaaatgaaaagaaagttggaccatggttctgaggtccgctctttttctttgggaaagaaaccatgcaaagtctcagaatatacaagtaccactgggcttgtaccatgttcagcaacaccaacaacttttggggacctcagagcagccaatggccaagggcaacaacgacgccgaattacatctgtccagccacctacaggcctccaggaatggctaaaaatgtttcagagctggagtggaccagagaaattgcttgctttagatgaactcattgatagttgtgaaccaacacaagtaaaacatatgatgcaagtgatagaaccccagtttcaacgagacttcatttcattgctccctaaagagttggcactctatgtgctttcattcctggaacccaaagacctgctacaagcagctcagacatgtcgctactggagaattttggctgaagacaaccttctctggagagagaaatgcaaagaagaggggattgatgaaccattgcacatcaagagaagaaaagtaataaaaccaggtttcatacacagtccatggaaaagtgcatacatcagacagcacagaattgatactaactcgaggcgaggaggcagcggcagccggccccccttcacctacgccacactgatcagatgggccatcctggaagccccagaaaaacagcgcacccttaacgagatctaccactggttcaccagaatgttcgcctttttccggaaccaccctgccacctggaagaacgccattcggcacaacctgtctctgcacaagtgcttcgtgcgggtcgagagcgagaagggagctgtgtggaccgtggacgagctggagttccggaagaagcggagccaaagaccaagcaggtaa

SEQ ID NO: 1484 - DNA, 1413 bp, synthetic construct
  source 1..1413: mol_type = other DNA; note = HA-FBXW7a-(GS)3-FOXP3DBD nucleic acid
atgtacccatacgatgttccagattacgctaatcaggaactgctctctgtgggcagcaaaagacgacgaactggaggctctctgagaggtaacccttcctcaagccaggtagatgaagaacagatgaatcgtgtggtagaggaggaacagcaacagcaactcagacaacaagaggaggagcacactgcaaggaatggtgaagttgttggagtagaacctagacctggaggccaaaatgattcccagcaaggacagttggaagaaaacaataatagatttatttcggtagatgaggactcctcaggaaaccaagaagaacaagaggaagatgaagaacatgctggtgaacaagatgaggaggatgaggaggaggaggagatggaccaggagagtgacgattttgatcagtctgatgatagtagcagagaagatgaacatacacatactaacagtgtcacgaactccagtagtattgtggacctgcccgttcaccaactctcctccccattctatacaaaaacaacaaaaatgaaaagaaagttggaccatggttctgaggtccgctctttttctttgggaaagaaaccatgcaaagtctcagaatatacaagtaccactgggcttgtaccatgttcagcaacaccaacaacttttggggacctcagagcagccaatggccaagggcaacaacgacgccgaattacatctgtccagccacctacaggcctccaggaatggctaaaaatgtttcagagctggagtggaccagagaaattgcttgctttagatgaactcattgatagttgtgaaccaacacaagtaaaacatatgatgcaagtgatagaaccccagtttcaacgagacttcatttcattgctccctaaagagttggcactctatgtgctttcattcctggaacccaaagacctgctacaagcagctcagacatgtcgctactggagaattttggctgaagacaaccttctctggagagagaaatgcaaagaagaggggattgatgaaccattgcacatcaagagaagaaaagtaataaaaccaggtttcatacacagtccatggaaaagtgcatacatcagacagcacagaattgatactaactcgaggcgaggaggcagcggcagcggcagccggccccccttcacctacgccacactgatcagatgggccatcctggaagccccagaaaaacagcgcacccttaacgagatctaccactggttcaccagaatgttcgcctttttccggaaccaccctgccacctggaagaacgccattcggcacaacctgtctctgcacaagtgcttcgtgcgggtcgagagcgagaagggagctgtgtggaccgtggacgagctggagttccggaagaagcggagccaaagaccaagcaggtaa

SEQ ID NO: 1485 - DNA, 1419 bp, synthetic construct
  source 1..1419: mol_type = other DNA; note = HA-FBXW7a-(GS)4-FOXP3DBD nucleic acid
atgtacccatacgatgttccagattacgctaatcaggaactgctctctgtgggcagcaaaagacgacgaactggaggctctctgagaggtaacccttcctcaagccaggtagatgaagaacagatgaatcgtgtggtagaggaggaacagcaacagcaactcagacaacaagaggaggagcacactgcaaggaatggtgaagttgttggagtagaacctagacctggaggccaaaatgattcccagcaaggacagttggaagaaaacaataatagatttatttcggtagatgaggactcctcaggaaaccaagaagaacaagaggaagatgaagaacatgctggtgaacaagatgaggaggatgaggaggaggaggagatggaccaggagagtgacgattttgatcagtctgatgatagtagcagagaagatgaacatacacatactaacagtgtcacgaactccagtagtattgtggacctgcccgttcaccaactctcctccccattctatacaaaaacaacaaaaatgaaaagaaagttggaccatggttctgaggtccgctctttttctttgggaaagaaaccatgcaaagtctcagaatatacaagtaccactgggcttgtaccatgttcagcaacaccaacaacttttggggacctcagagcagccaatggccaagggcaacaacgacgccgaattacatctgtccagccacctacaggcctccaggaatggctaaaaatgtttcagagctggagtggaccagagaaattgcttgctttagatgaactcattgatagttgtgaaccaacacaagtaaaacatatgatgcaagtgatagaaccccagtttcaacgagacttcatttcattgctccctaaagagttggcactctatgtgctttcattcctggaacccaaagacctgctacaagcagctcagacatgtcgctactggagaattttggctgaagacaaccttctctggagagagaaatgcaaagaagaggggattgatgaaccattgcacatcaagagaagaaaagtaataaaaccaggtttcatacacagtccatggaaaagtgcatacatcagacagcacagaattgatactaactcgaggcgaggaggcagcggcagcggcagcggcagccggccccccttcacctacgccacactgatcagatgggccatcctggaagccccagaaaaacagcgcacccttaacgagatctaccactggttcaccagaatgttcgcctttttccggaaccaccctgccacctggaagaacgccattcggcacaacctgtctctgcacaagtgcttcgtgcgggtcgagagcgagaagggagctgtgtggaccgtggacgagctggagttccggaagaagcggagccaaagaccaagcaggtaa

SEQ ID NO: 1486 - DNA, 1425 bp, synthetic construct
  source 1..1425: mol_type = other DNA; note = HA-FBXW7a-(GS)5-FOXP3DBD nucleic acid
atgtacccatacgatgttccagattacgctaatcaggaactgctctctgtgggcagcaaaagacgacgaactggaggctctctgagaggtaacccttcctcaagccaggtagatgaagaacagatgaatcgtgtggtagaggaggaacagcaacagcaactcagacaacaagaggaggagcacactgcaaggaatggtgaagttgttggagtagaacctagacctggaggccaaaatgattcccagcaaggacagttggaagaaaacaataatagatttatttcggtagatgaggactcctcaggaaaccaagaagaacaagaggaagatgaagaacatgctggtgaacaagatgaggaggatgaggaggaggaggagatggaccaggagagtgacgattttgatcagtctgatgatagtagcagagaagatgaacatacacatactaacagtgtcacgaactccagtagtattgtggacctgcccgttcaccaactctcctccccattctatacaaaaacaacaaaaatgaaaagaaagttggaccatggttctgaggtccgctctttttctttgggaaagaaaccatgcaaagtctcagaatatacaagtaccactgggcttgtaccatgttcagcaacaccaacaacttttggggacctcagagcagccaatggccaagggcaacaacgacgccgaattacatctgtccagccacctacaggcctccaggaatggctaaaaatgtttcagagctggagtggaccagagaaattgcttgctttagatgaactcattgatagttgtgaaccaacacaagtaaaacatatgatgcaagtgatagaaccccagtttcaacgagacttcatttcattgctccctaaagagttggcactctatgtgctttcattcctggaacccaaagacctgctacaagcagctcagacatgtcgctactggagaattttggctgaagacaaccttctctggagagagaaatgcaaagaagaggggattgatgaaccattgcacatcaagagaagaaaagtaataaaaccaggtttcatacacagtccatggaaaagtgcatacatcagacagcacagaattgatactaactcgaggcgaggaggcagcggcagcggcagcggcagcggcagccggccccccttcacctacgccacactgatcagatgggccatcctggaagccccagaaaaacagcgcacccttaacgagatctaccactggttcaccagaatgttcgcctttttccggaaccaccctgccacctggaagaacgccattcggcacaacctgtctctgcacaagtgcttcgtgcgggtcgagagcgagaagggagctgtgtggaccgtggacgagctggagttccggaagaagcggagccaaagaccaagcaggtaa

SEQ ID NO: 1487 - DNA, 1431 bp, synthetic construct
  source 1..1431: mol_type = other DNA; note = HA-FBXW7a-(GS)6-FOXP3DBD nucleic acid
atgtacccatacgatgttccagattacgctaatcaggaactgctctctgtgggcagcaaaagacgacgaactggaggctctctgagaggtaacccttcctcaagccaggtagatgaagaacagatgaatcgtgtggtagaggaggaacagcaacagcaactcagacaacaagaggaggagcacactgcaaggaatggtgaagttgttggagtagaacctagacctggaggccaaaatgattcccagcaaggacagttggaagaaaacaataatagatttatttcggtagatgaggactcctcaggaaaccaagaagaacaagaggaagatgaagaacatgctggtgaacaagatgaggaggatgaggaggaggaggagatggaccaggagagtgacgattttgatcagtctgatgatagtagcagagaagatgaacatacacatactaacagtgtcacgaactccagtagtattgtggacctgcccgttcaccaactctcctccccattctatacaaaaacaacaaaaatgaaaagaaagttggaccatggttctgaggtccgctctttttctttgggaaagaaaccatgcaaagtctcagaatatacaagtaccactgggcttgtaccatgttcagcaacaccaacaacttttggggacctcagagcagccaatggccaagggcaacaacgacgccgaattacatctgtccagccacctacaggcctccaggaatggctaaaaatgtttcagagctggagtggaccagagaaattgcttgctttagatgaactcattgatagttgtgaaccaacacaagtaaaacatatgatgcaagtgatagaaccccagtttcaacgagacttcatttcattgctccctaaagagttggcactctatgtgctttcattcctggaacccaaagacctgctacaagcagctcagacatgtcgctactggagaattttggctgaagacaaccttctctggagagagaaatgcaaagaagaggggattgatgaaccattgcacatcaagagaagaaaagtaataaaaccaggtttcatacacagtccatggaaaagtgcatacatcagacagcacagaattgatactaactcgaggcgaggaggcagcggcagcggcagcggcagcggcagcggcagccggccccccttcacctacgccacactgatcagatgggccatcctggaagccccagaaaaacagcgcacccttaacgagatctaccactggttcaccagaatgttcgcctttttccggaaccaccctgccacctggaagaacgccattcggcacaacctgtctctgcacaagtgcttcgtgcgggtcgagagcgagaagggagctgtgtggaccgtggacgagctggagttccggaagaagcggagccaaagaccaagcaggtaa

SEQ ID NO: 1488 - DNA, 1278 bp, synthetic construct
  source 1..1278: mol_type = other DNA; note = NLS-Keap1-(GS)1-FOXP3DBD nucleic acid
ccggcggcgaaacgcgtgaaactggatggcagcggcagcggcagccagccagatcccaggcctagcggggctggggcctgctgccgattcctgcccctgcagtcacagtgccctgagggggcaggggacgcggtgatgtacgcctccactgagtgcaaggcggaggtgacgccctcccagcatggcaaccgcaccttcagctacaccctggaggatcataccaagcaggcctttggcatcatgaacgagctgcggctcagccagcagctgtgtgacgtcacactgcaggtcaagtaccaggatgcaccggccgcccagttcatggcccacaaggtggtgctggcctcatccagccctgtcttcaaggccatgttcaccaacgggctgcgggagcagggcatggaggtggtgtccattgagggtatccaccccaaggtcatggagcgcctcattgaattcgcctacacggcctccatctccatgggcgagaagtgtgtcctccacgtcatgaacggtgctgtcatgtaccagatcgacagcgttgtccgtgcctgcagtgacttcctggtgcagcagctggaccccagcaatgccatcggcatcgccaacttcgctgagcagattggctgtgtggagttgcaccagcgtgcccgggagtacatctacatgcattttggggaggtggccaagcaagaggagttcttcaacctgtcccactgccaactggtgaccctcatcagccgggacgacctgaacgtgcgctgcgagtccgaggtcttccacgcctgcatcaactgggtcaagtacgactgcgaacagcgacggttctacgtccaggcgctgctgcgggccgtgcgctgccactcgttgacgccgaacttcctgcagatgcagctgcagaagtgcgagatcctgcagtccgactcccgctgcaaggactacctggtcaagatcttcgaggagctcaccctgcacaagcccacgcaggtgatgccctgccgggcgcccggcagccggccccccttcacctacgccacactgatcagatgggccatcctggaagccccagaaaaacagcgcacccttaacgagatctaccactggttcaccagaatgttcgcctttttccggaaccaccctgccacctggaagaacgccattcggcacaacctgtctctgcacaagtgcttcgtgcgggtcgagagcgagaagggagctgtgtggaccgtggacgagctggagttccggaagaagcggagccaaagaccaagcaggtaa

SEQ ID NO: 1489 - DNA, 1284 bp, synthetic construct
  source 1..1284: mol_type = other DNA; note = NLS-Keap1-(GS)2-FOXP3DBD nucleic acid
ccggcggcgaaacgcgtgaaactggatggcagcggcagcggcagccagccagatcccaggcctagcggggctggggcctgctgccgattcctgcccctgcagtcacagtgccctgagggggcaggggacgcggtgatgtacgcctccactgagtgcaaggcggaggtgacgccctcccagcatggcaaccgcaccttcagctacaccctggaggatcataccaagcaggcctttggcatcatgaacgagctgcggctcagccagcagctgtgtgacgtcacactgcaggtcaagtaccaggatgcaccggccgcccagttcatggcccacaaggtggtgctggcctcatccagccctgtcttcaaggccatgttcaccaacgggctgcgggagcagggcatggaggtggtgtccattgagggtatccaccccaaggtcatggagcgcctcattgaattcgcctacacggcctccatctccatgggcgagaagtgtgtcctccacgtcatgaacggtgctgtcatgtaccagatcgacagcgttgtccgtgcctgcagtgacttcctggtgcagcagctggaccccagcaatgccatcggcatcgccaacttcgctgagcagattggctgtgtggagttgcaccagcgtgcccgggagtacatctacatgcattttggggaggtggccaagcaagaggagttcttcaacctgtcccactgccaactggtgaccctcatcagccgggacgacctgaacgtgcgctgcgagtccgaggtcttccacgcctgcatcaactgggtcaagtacgactgcgaacagcgacggttctacgtccaggcgctgctgcgggccgtgcgctgccactcgttgacgccgaacttcctgcagatgcagctgcagaagtgcgagatcctgcagtccgactcccgctgcaaggactacctggtcaagatcttcgaggagctcaccctgcacaagcccacgcaggtgatgccctgccgggcgcccggcagcggcagccggccccccttcacctacgccacactgatcagatgggccatcctggaagccccagaaaaacagcgcacccttaacgagatctaccactggttcaccagaatgttcgcctttttccggaaccaccctgccacctggaagaacgccattcggcacaacctgtctctgcacaagtgcttcgtgcgggtcgagagcgagaagggagctgtgtggaccgtggacgagctggagttccggaagaagcggagccaaagaccaagcaggtaa

SEQ ID NO: 1490 - DNA, 1290 bp, synthetic construct
  source 1..1290: mol_type = other DNA; note = NLS-Keap1-(GS)3-FOXP3DBD nucleic acid
ccggcggcgaaacgcgtgaaactggatggcagcggcagcggcagccagccagatcccaggcctagcggggctggggcctgctgccgattcctgcccctgcagtcacagtgccctgagggggcaggggacgcggtgatgtacgcctccactgagtgcaaggcggaggtgacgccctcccagcatggcaaccgcaccttcagctacaccctggaggatcataccaagcaggcctttggcatcatgaacgagctgcggctcagccagcagctgtgtgacgtcacactgcaggtcaagtaccaggatgcaccggccgcccagttcatggcccacaaggtggtgctggcctcatccagccctgtcttcaaggccatgttcaccaacgggctgcgggagcagggcatggaggtggtgtccattgagggtatccaccccaaggtcatggagcgcctcattgaattcgcctacacggcctccatctccatgggcgagaagtgtgtcctccacgtcatgaacggtgctgtcatgtaccagatcgacagcgttgtccgtgcctgcagtgacttcctggtgcagcagctggaccccagcaatgccatcggcatcgccaacttcgctgagcagattggctgtgtggagttgcaccagcgtgcccgggagtacatctacatgcattttggggaggtggccaagcaagaggagttcttcaacctgtcccactgccaactggtgaccctcatcagccgggacgacctgaacgtgcgctgcgagtccgaggtcttccacgcctgcatcaactgggtcaagtacgactgcgaacagcgacggttctacgtccaggcgctgctgcgggccgtgcgctgccactcgttgacgccgaacttcctgcagatgcagctgcagaagtgcgagatcctgcagtccgactcccgctgcaaggactacctggtcaagatcttcgaggagctcaccctgcacaagcccacgcaggtgatgccctgccgggcgcccggcagcggcagcggcagccggccccccttcacctacgccacactgatcagatgggccatcctggaagccccagaaaaacagcgcacccttaacgagatctaccactggttcaccagaatgttcgcctttttccggaaccaccctgccacctggaagaacgccattcggcacaacctgtctctgcacaagtgcttcgtgcgggtcgagagcgagaagggagctgtgtggaccgtggacgagctggagttccggaagaagcggagccaaagaccaagcaggtaa

SEQ ID NO: 1491 - DNA, 1296 bp, synthetic construct
  source 1..1296: mol_type = other DNA; note = NLS-Keap1-(GS)4-FOXP3DBD nucleic acid
ccggcggcgaaacgcgtgaaactggatggcagcggcagcggcagccagccagatcccaggcctagcggggctggggcctgctgccgattcctgcccctgcagtcacagtgccctgagggggcaggggacgcggtgatgtacgcctccactgagtgcaaggcggaggtgacgccctcccagcatggcaaccgcaccttcagctacaccctggaggatcataccaagcaggcctttggcatcatgaacgagctgcggctcagccagcagctgtgtgacgtcacactgcaggtcaagtaccaggatgcaccggccgcccagttcatggcccacaaggtggtgctggcctcatccagccctgtcttcaaggccatgttcaccaacgggctgcgggagcagggcatggaggtggtgtccattgagggtatccaccccaaggtcatggagcgcctcattgaattcgcctacacggcctccatctccatgggcgagaagtgtgtcctccacgtcatgaacggtgctgtcatgtaccagatcgacagcgttgtccgtgcctgcagtgacttcctggtgcagcagctggaccccagcaatgccatcggcatcgccaacttcgctgagcagattggctgtgtggagttgcaccagcgtgcccgggagtacatctacatgcattttggggaggtggccaagcaagaggagttcttcaacctgtcccactgccaactggtgaccctcatcagccgggacgacctgaacgtgcgctgcgagtccgaggtcttccacgcctgcatcaactgggtcaagtacgactgcgaacagcgacggttctacgtccaggcgctgctgcgggccgtgcgctgccactcgttgacgccgaacttcctgcagatgcagctgcagaagtgcgagatcctgcagtccgactcccgctgcaaggactacctggtcaagatcttcgaggagctcaccctgcacaagcccacgcaggtgatgccctgccgggcgcccggcagcggcagcggcagcggcagccggccccccttcacctacgccacactgatcagatgggccatcctggaagccccagaaaaacagcgcacccttaacgagatctaccactggttcaccagaatgttcgcctttttccggaaccaccctgccacctggaagaacgccattcggcacaacctgtctctgcacaagtgcttcgtgcgggtcgagagcgagaagggagctgtgtggaccgtggacgagctggagttccggaagaagcggagccaaagaccaagcaggtaa

SEQ ID NO: 1492 - DNA, 1302 bp, synthetic construct
  source 1..1302: mol_type = other DNA; note = NLS-Keap1-(GS)5-FOXP3DBD nucleic acid
ccggcggcgaaacgcgtgaaactggatggcagcggcagcggcagccagccagatcccaggcctagcggggctggggcctgctgccgattcctgcccctgcagtcacagtgccctgagggggcaggggacgcggtgatgtacgcctccactgagtgcaaggcggaggtgacgccctcccagcatggcaaccgcaccttcagctacaccctggaggatcataccaagcaggcctttggcatcatgaacgagctgcggctcagccagcagctgtgtgacgtcacactgcaggtcaagtaccaggatgcaccggccgcccagttcatggcccacaaggtggtgctggcctcatccagccctgtcttcaaggccatgttcaccaacgggctgcgggagcagggcatggaggtggtgtccattgagggtatccaccccaaggtcatggagcgcctcattgaattcgcctacacggcctccatctccatgggcgagaagtgtgtcctccacgtcatgaacggtgctgtcatgtaccagatcgacagcgttgtccgtgcctgcagtgacttcctggtgcagcagctggaccccagcaatgccatcggcatcgccaacttcgctgagcagattggctgtgtggagttgcaccagcgtgcccgggagtacatctacatgcattttggggaggtggccaagcaagaggagttcttcaacctgtcccactgccaactggtgaccctcatcagccgggacgacctgaacgtgcgctgcgagtccgaggtcttccacgcctgcatcaactgggtcaagtacgactgcgaacagcgacggttctacgtccaggcgctgctgcgggccgtgcgctgccactcgttgacgccgaacttcctgcagatgcagctgcagaagtgcgagatcctgcagtccgactcccgctgcaaggactacctggtcaagatcttcgaggagctcaccctgcacaagcccacgcaggtgatgccctgccgggcgcccggcagcggcagcggcagcggcagcggcagccggccccccttcacctacgccacactgatcagatgggccatcctggaagccccagaaaaacagcgcacccttaacgagatctaccactggttcaccagaatgttcgcctttttccggaaccaccctgccacctggaagaacgccattcggcacaacctgtctctgcacaagtgcttcgtgcgggtcgagagcgagaagggagctgtgtggaccgtggacgagctggagttccggaagaagcggagccaaagaccaagcaggtaa

SEQ ID NO: 1493 - DNA, 1308 bp, synthetic construct
  source 1..1308: mol_type = other DNA; note = NLS-Keap1-(GS)6-FOXP3DBD nucleic acid
ccggcggcgaaacgcgtgaaactggatggcagcggcagcggcagccagccagatcccaggcctagcggggctggggcctgctgccgattcctgcccctgcagtcacagtgccctgagggggcaggggacgcggtgatgtacgcctccactgagtgcaaggcggaggtgacgccctcccagcatggcaaccgcaccttcagctacaccctggaggatcataccaagcaggcctttggcatcatgaacgagctgcggctcagccagcagctgtgtgacgtcacactgcaggtcaagtaccaggatgcaccggccgcccagttcatggcccacaaggtggtgctggcctcatccagccctgtcttcaaggccatgttcaccaacgggctgcgggagcagggcatggaggtggtgtccattgagggtatccaccccaaggtcatggagcgcctcattgaattcgcctacacggcctccatctccatgggcgagaagtgtgtcctccacgtcatgaacggtgctgtcatgtaccagatcgacagcgttgtccgtgcctgcagtgacttcctggtgcagcagctggaccccagcaatgccatcggcatcgccaacttcgctgagcagattggctgtgtggagttgcaccagcgtgcccgggagtacatctacatgcattttggggaggtggccaagcaagaggagttcttcaacctgtcccactgccaactggtgaccctcatcagccgggacgacctgaacgtgcgctgcgagtccgaggtcttccacgcctgcatcaactgggtcaagtacgactgcgaacagcgacggttctacgtccaggcgctgctgcgggccgtgcgctgccactcgttgacgccgaacttcctgcagatgcagctgcagaagtgcgagatcctgcagtccgactcccgctgcaaggactacctggtcaagatcttcgaggagctcaccctgcacaagcccacgcaggtgatgccctgccgggcgcccggcagcggcagcggcagcggcagcggcagcggcagccggccccccttcacctacgccacactgatcagatgggccatcctggaagccccagaaaaacagcgcacccttaacgagatctaccactggttcaccagaatgttcgcctttttccggaaccaccctgccacctggaagaacgccattcggcacaacctgtctctgcacaagtgcttcgtgcgggtcgagagcgagaagggagctgtgtggaccgtggacgagctggagttccggaagaagcggagccaaagaccaagcaggtaa

SEQ ID NO: 1494 - DNA, 1308 bp, synthetic construct
  source 1..1308: mol_type = other DNA; note = HA-NLS-Keap1-(GS)1-FOXP3DBD nucleic acid
atgtacccatacgatgttccagattacgctccggcggcgaaacgcgtgaaactggatggcagcggcagcggcagccagccagatcccaggcctagcggggctggggcctgctgccgattcctgcccctgcagtcacagtgccctgagggggcaggggacgcggtgatgtacgcctccactgagtgcaaggcggaggtgacgccctcccagcatggcaaccgcaccttcagctacaccctggaggatcataccaagcaggcctttggcatcatgaacgagctgcggctcagccagcagctgtgtgacgtcacactgcaggtcaagtaccaggatgcaccggccgcccagttcatggcccacaaggtggtgctggcctcatccagccctgtcttcaaggccatgttcaccaacgggctgcgggagcagggcatggaggtggtgtccattgagggtatccaccccaaggtcatggagcgcctcattgaattcgcctacacggcctccatctccatgggcgagaagtgtgtcctccacgtcatgaacggtgctgtcatgtaccagatcgacagcgttgtccgtgcctgcagtgacttcctggtgcagcagctggaccccagcaatgccatcggcatcgccaacttcgctgagcagattggctgtgtggagttgcaccagcgtgcccgggagtacatctacatgcattttggggaggtggccaagcaagaggagttcttcaacctgtcccactgccaactggtgaccctcatcagccgggacgacctgaacgtgcgctgcgagtccgaggtcttccacgcctgcatcaactgggtcaagtacgactgcgaacagcgacggttctacgtccaggcgctgctgcgggccgtgcgctgccactcgttgacgccgaacttcctgcagatgcagctgcagaagtgcgagatcctgcagtccgactcccgctgcaaggactacctggtcaagatcttcgaggagctcaccctgcacaagcccacgcaggtgatgccctgccgggcgcccggcagccggccccccttcacctacgccacactgatcagatgggccatcctggaagccccagaaaaacagcgcacccttaacgagatctaccactggttcaccagaatgttcgcctttttccggaaccaccctgccacctggaagaacgccattcggcacaacctgtctctgcacaagtgcttcgtgcgggtcgagagcgagaagggagctgtgtggaccgtggacgagctggagttccggaagaagcggagccaaagaccaagcaggtaa

SEQ ID NO: 1495 - DNA, 1314 bp, synthetic construct
  source 1..1314: mol_type = other DNA; note = HA-NLS-Keap1-(GS)2-FOXP3DBD nucleic acid
atgtacccatacgatgttccagattacgctccggcggcgaaacgcgtgaaactggatggcagcggcagcggcagccagccagatcccaggcctagcggggctggggcctgctgccgattcctgcccctgcagtcacagtgccctgagggggcaggggacgcggtgatgtacgcctccactgagtgcaaggcggaggtgacgccctcccagcatggcaaccgcaccttcagctacaccctggaggatcataccaagcaggcctttggcatcatgaacgagctgcggctcagccagcagctgtgtgacgtcacactgcaggtcaagtaccaggatgcaccggccgcccagttcatggcccacaaggtggtgctggcctcatccagccctgtcttcaaggccatgttcaccaacgggctgcgggagcagggcatggaggtggtgtccattgagggtatccaccccaaggtcatggagcgcctcattgaattcgcctacacggcctccatctccatgggcgagaagtgtgtcctccacgtcatgaacggtgctgtcatgtaccagatcgacagcgttgtccgtgcctgcagtgacttcctggtgcagcagctggaccccagcaatgccatcggcatcgccaacttcgctgagcagattggctgtgtggagttgcaccagcgtgcccgggagtacatctacatgcattttggggaggtggccaagcaagaggagttcttcaacctgtcccactgccaactggtgaccctcatcagccgggacgacctgaacgtgcgctgcgagtccgaggtcttccacgcctgcatcaactgggtcaagtacgactgcgaacagcgacggttctacgtccaggcgctgctgcgggccgtgcgctgccactcgttgacgccgaacttcctgcagatgcagctgcagaagtgcgagatcctgcagtccgactcccgctgcaaggactacctggtcaagatcttcgaggagctcaccctgcacaagcccacgcaggtgatgccctgccgggcgcccggcagcggcagccggccccccttcacctacgccacactgatcagatgggccatcctggaagccccagaaaaacagcgcacccttaacgagatctaccactggttcaccagaatgttcgcctttttccggaaccaccctgccacctggaagaacgccattcggcacaacctgtctctgcacaagtgcttcgtgcgggtcgagagcgagaagggagctgtgtggaccgtggacgagctggagttccggaagaagcggagccaaagaccaagcaggtaa

SEQ ID NO: 1496 - DNA, 1320 bp, synthetic construct
  source 1..1320: mol_type = other DNA; note = HA-NLS-Keap1-(GS)3-FOXP3DBD nucleic acid
atgtacccatacgatgttccagattacgctccggcggcgaaacgcgtgaaactggatggcagcggcagcggcagccagccagatcccaggcctagcggggctggggcctgctgccgattcctgcccctgcagtcacagtgccctgagggggcaggggacgcggtgatgtacgcctccactgagtgcaaggcggaggtgacgccctcccagcatggcaaccgcaccttcagctacaccctggaggatcataccaagcaggcctttggcatcatgaacgagctgcggctcagccagcagctgtgtgacgtcacactgcaggtcaagtaccaggatgcaccggccgcccagttcatggcccacaaggtggtgctggcctcatccagccctgtcttcaaggccatgttcaccaacgggctgcgggagcagggcatggaggtggtgtccattgagggtatccaccccaaggtcatggagcgcctcattgaattcgcctacacggcctccatctccatgggcgagaagtgtgtcctccacgtcatgaacggtgctgtcatgtaccagatcgacagcgttgtccgtgcctgcagtgacttcctggtgcagcagctggaccccagcaatgccatcggcatcgccaacttcgctgagcagattggctgtgtggagttgcaccagcgtgcccgggagtacatctacatgcattttggggaggtggccaagcaagaggagttcttcaacctgtcccactgccaactggtgaccctcatcagccgggacgacctgaacgtgcgctgcgagtccgaggtcttccacgcctgcatcaactgggtcaagtacgactgcgaacagcgacggttctacgtccaggcgctgctgcgggccgtgcgctgccactcgttgacgccgaacttcctgcagatgcagctgcagaagtgcgagatcctgcagtccgactcccgctgcaaggactacctggtcaagatcttcgaggagctcaccctgcacaagcccacgcaggtgatgccctgccgggcgcccggcagcggcagcggcagccggccccccttcacctacgccacactgatcagatgggccatcctggaagccccagaaaaacagcgcacccttaacgagatctaccactggttcaccagaatgttcgcctttttccggaaccaccctgccacctggaagaacgccattcggcacaacctgtctctgcacaagtgcttcgtgcgggtcgagagcgagaagggagctgtgtggaccgtggacgagctggagttccggaagaagcggagccaaagaccaagcaggtaa

SEQ ID NO: 1497 - DNA, 1326 bp, synthetic construct
  source 1..1326: mol_type = other DNA; note = HA-NLS-Keap1-(GS)4-FOXP3DBD nucleic acid
atgtacccatacgatgttccagattacgctccggcggcgaaacgcgtgaaactggatggcagcggcagcggcagccagccagatcccaggcctagcggggctggggcctgctgccgattcctgcccctgcagtcacagtgccctgagggggcaggggacgcggtgatgtacgcctccactgagtgcaaggcggaggtgacgccctcccagcatggcaaccgcaccttcagctacaccctggaggatcataccaagcaggcctttggcatcatgaacgagctgcggctcagccagcagctgtgtgacgtcacactgcaggtcaagtaccaggatgcaccggccgcccagttcatggcccacaaggtggtgctggcctcatccagccctgtcttcaaggccatgttcaccaacgggctgcgggagcagggcatggaggtggtgtccattgagggtatccaccccaaggtcatggagcgcctcattgaattcgcctacacggcctccatctccatgggcgagaagtgtgtcctccacgtcatgaacggtgctgtcatgtaccagatcgacagcgttgtccgtgcctgcagtgacttcctggtgcagcagctggaccccagcaatgccatcggcatcgccaacttcgctgagcagattggctgtgtggagttgcaccagcgtgcccgggagtacatctacatgcattttggggaggtggccaagcaagaggagttcttcaacctgtcccactgccaactggtgaccctcatcagccgggacgacctgaacgtgcgctgcgagtccgaggtcttccacgcctgcatcaactgggtcaagtacgactgcgaacagcgacggttctacgtccaggcgctgctgcgggccgtgcgctgccactcgttgacgccgaacttcctgcagatgcagctgcagaagtgcgagatcctgcagtccgactcccgctgcaaggactacctggtcaagatcttcgaggagctcaccctgcacaagcccacgcaggtgatgccctgccgggcgcccggcagcggcagcggcagcggcagccggccccccttcacctacgccacactgatcagatgggccatcctggaagccccagaaaaacagcgcacccttaacgagatctaccactggttcaccagaatgttcgcctttttccggaaccaccctgccacctggaagaacgccattcggcacaacctgtctctgcacaagtgcttcgtgcgggtcgagagcgagaagggagctgtgtggaccgtggacgagctggagttccggaagaagcggagccaaagaccaagcaggtaa

SEQ ID NO: 1498 - DNA, 1332 bp, synthetic construct
  source 1..1332: mol_type = other DNA; note = HA-NLS-Keap1-(GS)5-FOXP3DBD nucleic acid
atgtacccatacgatgttccagattacgctccggcggcgaaacgcgtgaaactggatggcagcggcagcggcagccagccagatcccaggcctagcggggctggggcctgctgccgattcctgcccctgcagtcacagtgccctgagggggcaggggacgcggtgatgtacgcctccactgagtgcaaggcggaggtgacgccctcccagcatggcaaccgcaccttcagctacaccctggaggatcataccaagcaggcctttggcatcatgaacgagctgcggctcagccagcagctgtgtgacgtcacactgcaggtcaagtaccaggatgcaccggccgcccagttcatggcccacaaggtggtgctggcctcatccagccctgtcttcaaggccatgttcaccaacgggctgcgggagcagggcatggaggtggtgtccattgagggtatccaccccaaggtcatggagcgcctcattgaattcgcctacacggcctccatctccatgggcgagaagtgtgtcctccacgtcatgaacggtgctgtcatgtaccagatcgacagcgttgtccgtgcctgcagtgacttcctggtgcagcagctggaccccagcaatgccatcggcatcgccaacttcgctgagcagattggctgtgtggagttgcaccagcgtgcccgggagtacatctacatgcattttggggaggtggccaagcaagaggagttcttcaacctgtcccactgccaactggtgaccctcatcagccgggacgacctgaacgtgcgctgcgagtccgaggtcttccacgcctgcatcaactgggtcaagtacgactgcgaacagcgacggttctacgtccaggcgctgctgcgggccgtgcgctgccactcgttgacgccgaacttcctgcagatgcagctgcagaagtgcgagatcctgcagtccgactcccgctgcaaggactacctggtcaagatcttcgaggagctcaccctgcacaagcccacgcaggtgatgccctgccgggcgcccggcagcggcagcggcagcggcagcggcagccggccccccttcacctacgccacactgatcagatgggccatcctggaagccccagaaaaacagcgcacccttaacgagatctaccactggttcaccagaatgttcgcctttttccggaaccaccctgccacctggaagaacgccattcggcacaacctgtctctgcacaagtgcttcgtgcgggtcgagagcgagaagggagctgtgtggaccgtggacgagctggagttccggaagaagcggagccaaagaccaagcaggtaa

SEQ ID NO: 1499 - DNA, 1338 bp, synthetic construct
  source 1..1338: mol_type = other DNA; note = HA-NLS-Keap1-(GS)6-FOXP3DBD nucleic acid
atgtacccatacgatgttccagattacgctccggcggcgaaacgcgtgaaactggatggcagcggcagcggcagccagccagatcccaggcctagcggggctggggcctgctgccgattcctgcccctgcagtcacagtgccctgagggggcaggggacgcggtgatgtacgcctccactgagtgcaaggcggaggtgacgccctcccagcatggcaaccgcaccttcagctacaccctggaggatcataccaagcaggcctttggcatcatgaacgagctgcggctcagccagcagctgtgtgacgtcacactgcaggtcaagtaccaggatgcaccggccgcccagttcatggcccacaaggtggtgctggcctcatccagccctgtcttcaaggccatgttcaccaacgggctgcgggagcagggcatggaggtggtgtccattgagggtatccaccccaaggtcatggagcgcctcattgaattcgcctacacggcctccatctccatgggcgagaagtgtgtcctccacgtcatgaacggtgctgtcatgtaccagatcgacagcgttgtccgtgcctgcagtgacttcctggtgcagcagctggaccccagcaatgccatcggcatcgccaacttcgctgagcagattggctgtgtggagttgcaccagcgtgcccgggagtacatctacatgcattttggggaggtggccaagcaagaggagttcttcaacctgtcccactgccaactggtgaccctcatcagccgggacgacctgaacgtgcgctgcgagtccgaggtcttccacgcctgcatcaactgggtcaagtacgactgcgaacagcgacggttctacgtccaggcgctgctgcgggccgtgcgctgccactcgttgacgccgaacttcctgcagatgcagctgcagaagtgcgagatcctgcagtccgactcccgctgcaaggactacctggtcaagatcttcgaggagctcaccctgcacaagcccacgcaggtgatgccctgccgggcgcccggcagcggcagcggcagcggcagcggcagcggcagccggccccccttcacctacgccacactgatcagatgggccatcctggaagccccagaaaaacagcgcacccttaacgagatctaccactggttcaccagaatgttcgcctttttccggaaccaccctgccacctggaagaacgccattcggcacaacctgtctctgcacaagtgcttcgtgcgggtcgagagcgagaagggagctgtgtggaccgtggacgagctggagttccggaagaagcggagccaaagaccaagcaggtaa

SEQ ID NO: 1500 - DNA, 696 bp, synthetic construct
  source 1..696: mol_type = other DNA; note = NLS-RNF125-(GS)1-FOXP3DBD nucleic acid
ccggcggcgaaacgcgtgaaactggatggcagcggcagcggcagcggctccgtgctgagcaccgacagcggcaaatcggcgcccgcctctgccaccgcgcgggccctggagcgcaggagggacccggagttgcccgtcacgtccttcgactgcgccgtgtgccttgaggtgttacaccagcctgtccggacccgctgcggccacgtattctgccgttcctgtattgctaccagtctgaagaacaacaagtggacctgtccttattgccgggcatatcttccttcagaaggagttccagcaactgatgtagccaaaagaatgaaatcagagtataagaactgcgctgagtgtgacaccctggtttgcctcagtgaaatgagggcacatattcggacttgtcagaagtacatagataagtatggaccaggcagccggccccccttcacctacgccacactgatcagatgggccatcctggaagccccagaaaaacagcgcacccttaacgagatctaccactggttcaccagaatgttcgcctttttccggaaccaccctgccacctggaagaacgccattcggcacaacctgtctctgcacaagtgcttcgtgcgggtcgagagcgagaagggagctgtgtggaccgtggacgagctggagttccggaagaagcggagccaaagaccaagcaggtaa

SEQ ID NO: 1501 - DNA, 702 bp, synthetic construct
  source 1..702: mol_type = other DNA; note = NLS-RNF125-(GS)2-FOXP3DBD nucleic acid
ccggcggcgaaacgcgtgaaactggatggcagcggcagcggcagcggctccgtgctgagcaccgacagcggcaaatcggcgcccgcctctgccaccgcgcgggccctggagcgcaggagggacccggagttgcccgtcacgtccttcgactgcgccgtgtgccttgaggtgttacaccagcctgtccggacccgctgcggccacgtattctgccgttcctgtattgctaccagtctgaagaacaacaagtggacctgtccttattgccgggcatatcttccttcagaaggagttccagcaactgatgtagccaaaagaatgaaatcagagtataagaactgcgctgagtgtgacaccctggtttgcctcagtgaaatgagggcacatattcggacttgtcagaagtacatagataagtatggaccaggcagcggcagccggccccccttcacctacgccacactgatcagatgggccatcctggaagccccagaaaaacagcgcacccttaacgagatctaccactggttcaccagaatgttcgcctttttccggaaccaccctgccacctggaagaacgccattcggcacaacctgtctctgcacaagtgcttcgtgcgggtcgagagcgagaagggagctgtgtggaccgtggacgagctggagttccggaagaagcggagccaaagaccaagcaggtaa

SEQ ID NO: 1502 - DNA, 708 bp, synthetic construct
  source 1..708: mol_type = other DNA; note = NLS-RNF125-(GS)3-FOXP3DBD nucleic acid
ccggcggcgaaacgcgtgaaactggatggcagcggcagcggcagcggctccgtgctgagcaccgacagcggcaaatcggcgcccgcctctgccaccgcgcgggccctggagcgcaggagggacccggagttgcccgtcacgtccttcgactgcgccgtgtgccttgaggtgttacaccagcctgtccggacccgctgcggccacgtattctgccgttcctgtattgctaccagtctgaagaacaacaagtggacctgtccttattgccgggcatatcttccttcagaaggagttccagcaactgatgtagccaaaagaatgaaatcagagtataagaactgcgctgagtgtgacaccctggtttgcctcagtgaaatgagggcacatattcggacttgtcagaagtacatagataagtatggaccaggcagcggcagcggcagccggccccccttcacctacgccacactgatcagatgggccatcctggaagccccagaaaaacagcgcacccttaacgagatctaccactggttcaccagaatgttcgcctttttccggaaccaccctgccacctggaagaacgccattcggcacaacctgtctctgcacaagtgcttcgtgcgggtcgagagcgagaagggagctgtgtggaccgtggacgagctggagttccggaagaagcggagccaaagaccaagcaggtaa

SEQ ID NO: 1503 - DNA, 714 bp, synthetic construct
  source 1..714: mol_type = other DNA; note = NLS-RNF125-(GS)4-FOXP3DBD nucleic acid
ccggcggcgaaacgcgtgaaactggatggcagcggcagcggcagcggctccgtgctgagcaccgacagcggcaaatcggcgcccgcctctgccaccgcgcgggccctggagcgcaggagggacccggagttgcccgtcacgtccttcgactgcgccgtgtgccttgaggtgttacaccagcctgtccggacccgctgcggccacgtattctgccgttcctgtattgctaccagtctgaagaacaacaagtggacctgtccttattgccgggcatatcttccttcagaaggagttccagcaactgatgtagccaaaagaatgaaatcagagtataagaactgcgctgagtgtgacaccctggtttgcctcagtgaaatgagggcacatattcggacttgtcagaagtacatagataagtatggaccaggcagcggcagcggcagcggcagccggccccccttcacctacgccacactgatcagatgggccatcctggaagccccagaaaaacagcgcacccttaacgagatctaccactggttcaccagaatgttcgcctttttccggaaccaccctgccacctggaagaacgccattcggcacaacctgtctctgcacaagtgcttcgtgcgggtcgagagcgagaagggagctgtgtggaccgtggacgagctggagttccggaagaagcggagccaaagaccaagcaggtaa

SEQ ID NO: 1504 - DNA, 720 bp, synthetic construct
  source 1..720: mol_type = other DNA; note = NLS-RNF125-(GS)5-FOXP3DBD nucleic acid
ccggcggcgaaacgcgtgaaactggatggcagcggcagcggcagcggctccgtgctgagcaccgacagcggcaaatcggcgcccgcctctgccaccgcgcgggccctggagcgcaggagggacccggagttgcccgtcacgtccttcgactgcgccgtgtgccttgaggtgttacaccagcctgtccggacccgctgcggccacgtattctgccgttcctgtattgctaccagtctgaagaacaacaagtggacctgtccttattgccgggcatatcttccttcagaaggagttccagcaactgatgtagccaaaagaatgaaatcagagtataagaactgcgctgagtgtgacaccctggtttgcctcagtgaaatgagggcacatattcggacttgtcagaagtacatagataagtatggaccaggcagcggcagcggcagcggcagcggcagccggccccccttcacctacgccacactgatcagatgggccatcctggaagccccagaaaaacagcgcacccttaacgagatctaccactggttcaccagaatgttcgcctttttccggaaccaccctgccacctggaagaacgccattcggcacaacctgtctctgcacaagtgcttcgtgcgggtcgagagcgagaagggagctgtgtggaccgtggacgagctggagttccggaagaagcggagccaaagaccaagcaggtaa

SEQ ID NO: 1505 - DNA, 726 bp, synthetic construct
  source 1..726: mol_type = other DNA; note = NLS-RNF125-(GS)6-FOXP3DBD nucleic acid
ccggcggcgaaacgcgtgaaactggatggcagcggcagcggcagcggctccgtgctgagcaccgacagcggcaaatcggcgcccgcctctgccaccgcgcgggccctggagcgcaggagggacccggagttgcccgtcacgtccttcgactgcgccgtgtgccttgaggtgttacaccagcctgtccggacccgctgcggccacgtattctgccgttcctgtattgctaccagtctgaagaacaacaagtggacctgtccttattgccgggcatatcttccttcagaaggagttccagcaactgatgtagccaaaagaatgaaatcagagtataagaactgcgctgagtgtgacaccctggtttgcctcagtgaaatgagggcacatattcggacttgtcagaagtacatagataagtatggaccaggcagcggcagcggcagcggcagcggcagcggcagccggccccccttcacctacgccacactgatcagatgggccatcctggaagccccagaaaaacagcgcacccttaacgagatctaccactggttcaccagaatgttcgcctttttccggaaccaccctgccacctggaagaacgccattcggcacaacctgtctctgcacaagtgcttcgtgcgggtcgagagcgagaagggagctgtgtggaccgtggacgagctggagttccggaagaagcggagccaaagaccaagcaggtaa

SEQ ID NO: 1506 - DNA, 726 bp, synthetic construct
  source 1..726: mol_type = other DNA; note = HA-NLS-RNF125-(GS)1-FOXP3DBD nucleic acid
atgtacccatacgatgttccagattacgctccggcggcgaaacgcgtgaaactggatggcagcggcagcggcagcggctccgtgctgagcaccgacagcggcaaatcggcgcccgcctctgccaccgcgcgggccctggagcgcaggagggacccggagttgcccgtcacgtccttcgactgcgccgtgtgccttgaggtgttacaccagcctgtccggacccgctgcggccacgtattctgccgttcctgtattgctaccagtctgaagaacaacaagtggacctgtccttattgccgggcatatcttccttcagaaggagttccagcaactgatgtagccaaaagaatgaaatcagagtataagaactgcgctgagtgtgacaccctggtttgcctcagtgaaatgagggcacatattcggacttgtcagaagtacatagataagtatggaccaggcagccggccccccttcacctacgccacactgatcagatgggccatcctggaagccccagaaaaacagcgcacccttaacgagatctaccactggttcaccagaatgttcgcctttttccggaaccaccctgccacctggaagaacgccattcggcacaacctgtctctgcacaagtgcttcgtgcgggtcgagagcgagaagggagctgtgtggaccgtggacgagctggagttccggaagaagcggagccaaagaccaagcaggtaa

SEQ ID NO: 1507 - DNA, 732 bp, synthetic construct
  source 1..732: mol_type = other DNA; note = HA-NLS-RNF125-(GS)2-FOXP3DBD nucleic acid
atgtacccatacgatgttccagattacgctccggcggcgaaacgcgtgaaactggatggcagcggcagcggcagcggctccgtgctgagcaccgacagcggcaaatcggcgcccgcctctgccaccgcgcgggccctggagcgcaggagggacccggagttgcccgtcacgtccttcgactgcgccgtgtgccttgaggtgttacaccagcctgtccggacccgctgcggccacgtattctgccgttcctgtattgctaccagtctgaagaacaacaagtggacctgtccttattgccgggcatatcttccttcagaaggagttccagcaactgatgtagccaaaagaatgaaatcagagtataagaactgcgctgagtgtgacaccctggtttgcctcagtgaaatgagggcacatattcggacttgtcagaagtacatagataagtatggaccaggcagcggcagccggccccccttcacctacgccacactgatcagatgggccatcctggaagccccagaaaaacagcgcacccttaacgagatctaccactggttcaccagaatgttcgcctttttccggaaccaccctgccacctggaagaacgccattcggcacaacctgtctctgcacaagtgcttcgtgcgggtcgagagcgagaagggagctgtgtggaccgtggacgagctggagttccggaagaagcggagccaaagaccaagcaggtaa

SEQ ID NO: 1508 - DNA, 738 bp, synthetic construct
  source 1..738: mol_type = other DNA; note = HA-NLS-RNF125-(GS)3-FOXP3DBD nucleic acid
atgtacccatacgatgttccagattacgctccggcggcgaaacgcgtgaaactggatggcagcggcagcggcagcggctccgtgctgagcaccgacagcggcaaatcggcgcccgcctctgccaccgcgcgggccctggagcgcaggagggacccggagttgcccgtcacgtccttcgactgcgccgtgtgccttgaggtgttacaccagcctgtccggacccgctgcggccacgtattctgccgttcctgtattgctaccagtctgaagaacaacaagtggacctgtccttattgccgggcatatcttccttcagaaggagttccagcaactgatgtagccaaaagaatgaaatcagagtataagaactgcgctgagtgtgacaccctggtttgcctcagtgaaatgagggcacatattcggacttgtcagaagtacatagataagtatggaccaggcagcggcagcggcagccggccccccttcacctacgccacactgatcagatgggccatcctggaagccccagaaaaacagcgcacccttaacgagatctaccactggttcaccagaatgttcgcctttttccggaaccaccctgccacctggaagaacgccattcggcacaacctgtctctgcacaagtgcttcgtgcgggtcgagagcgagaagggagctgtgtggaccgtggacgagctggagttccggaagaagcggagccaaagaccaagcaggtaa

SEQ ID NO: 1509 - DNA, 744 bp, synthetic construct
  source 1..744: mol_type = other DNA; note = HA-NLS-RNF125-(GS)4-FOXP3DBD nucleic acid
atgtacccatacgatgttccagattacgctccggcggcgaaacgcgtgaaactggatggcagcggcagcggcagcggctccgtgctgagcaccgacagcggcaaatcggcgcccgcctctgccaccgcgcgggccctggagcgcaggagggacccggagttgcccgtcacgtccttcgactgcgccgtgtgccttgaggtgttacaccagcctgtccggacccgctgcggccacgtattctgccgttcctgtattgctaccagtctgaagaacaacaagtggacctgtccttattgccgggcatatcttccttcagaaggagttccagcaactgatgtagccaaaagaatgaaatcagagtataagaactgcgctgagtgtgacaccctggtttgcctcagtgaaatgagggcacatattcggacttgtcagaagtacatagataagtatggaccaggcagcggcagcggcagcggcagccggccccccttcacctacgccacactgatcagatgggccatcctggaagccccagaaaaacagcgcacccttaacgagatctaccactggttcaccagaatgttcgcctttttccggaaccaccctgccacctggaagaacgccattcggcacaacctgtctctgcacaagtgcttcgtgcgggtcgagagcgagaagggagctgtgtggaccgtggacgagctggagttccggaagaagcggagccaaagaccaagcaggtaa

SEQ ID NO: 1510 - DNA, 750 bp, synthetic construct
  source 1..750: mol_type = other DNA; note = HA-NLS-RNF125-(GS)5-FOXP3DBD nucleic acid
atgtacccatacgatgttccagattacgctccggcggcgaaacgcgtgaaactggatggcagcggcagcggcagcggctccgtgctgagcaccgacagcggcaaatcggcgcccgcctctgccaccgcgcgggccctggagcgcaggagggacccggagttgcccgtcacgtccttcgactgcgccgtgtgccttgaggtgttacaccagcctgtccggacccgctgcggccacgtattctgccgttcctgtattgctaccagtctgaagaacaacaagtggacctgtccttattgccgggcatatcttccttcagaaggagttccagcaactgatgtagccaaaagaatgaaatcagagtataagaactgcgctgagtgtgacaccctggtttgcctcagtgaaatgagggcacatattcggacttgtcagaagtacatagataagtatggaccaggcagcggcagcggcagcggcagcggcagccggccccccttcacctacgccacactgatcagatgggccatcctggaagccccagaaaaacagcgcacccttaacgagatctaccactggttcaccagaatgttcgcctttttccggaaccaccctgccacctggaagaacgccattcggcacaacctgtctctgcacaagtgcttcgtgcgggtcgagagcgagaagggagctgtgtggaccgtggacgagctggagttccggaagaagcggagccaaagaccaagcaggtaa

SEQ ID NO: 1511 - DNA, 756 bp, synthetic construct
  source 1..756: mol_type = other DNA; note = HA-NLS-RNF125-(GS)6-FOXP3DBD nucleic acid
atgtacccatacgatgttccagattacgctccggcggcgaaacgcgtgaaactggatggcagcggcagcggcagcggctccgtgctgagcaccgacagcggcaaatcggcgcccgcctctgccaccgcgcgggccctggagcgcaggagggacccggagttgcccgtcacgtccttcgactgcgccgtgtgccttgaggtgttacaccagcctgtccggacccgctgcggccacgtattctgccgttcctgtattgctaccagtctgaagaacaacaagtggacctgtccttattgccgggcatatcttccttcagaaggagttccagcaactgatgtagccaaaagaatgaaatcagagtataagaactgcgctgagtgtgacaccctggtttgcctcagtgaaatgagggcacatattcggacttgtcagaagtacatagataagtatggaccaggcagcggcagcggcagcggcagcggcagcggcagccggccccccttcacctacgccacactgatcagatgggccatcctggaagccccagaaaaacagcgcacccttaacgagatctaccactggttcaccagaatgttcgcctttttccggaaccaccctgccacctggaagaacgccattcggcacaacctgtctctgcacaagtgcttcgtgcgggtcgagagcgagaagggagctgtgtggaccgtggacgagctggagttccggaagaagcggagccaaagaccaagcaggtaa

SEQ ID NO: 1512 - DNA, 993 bp, synthetic construct
  source 1..993: mol_type = other DNA; note = FOXP3DBD-(GS)1-SPOP-NLS nucleic acid
atgcggccccccttcacctacgccacactgatcagatgggccatcctggaagccccagaaaaacagcgcacccttaacgagatctaccactggttcaccagaatgttcgcctttttccggaaccaccctgccacctggaagaacgccattcggcacaacctgtctctgcacaagtgcttcgtgcgggtcgagagcgagaagggagctgtgtggaccgtggacgagctggagttccggaagaagcggagccaaagaccaagcaggggcagcaacgggcttctccctgatgacaagcttaccctcttctgcgaggtgagtgttgtgcaagattctgtcaacatttctggccagaataccatgaacatggtaaaggttcctgagtgccggctggcagatgagttaggaggactgtgggagaattcccggttcacagactgctgcttgtgtgttgccggccaggaattccaggctcacaaggctatcttagcagctcgttctccggtttttagtgccatgtttgaacatgaaatggaggagagcaaaaagaatcgagttgaaatcaatgatgtggagcctgaagtttttaaggaaatgatgtgcttcatttacacggggaaggctccaaacctcgacaaaatggctgatgatttgctggcagctgctgacaagtatgccctggagcgcttaaaggtcatgtgtgaggatgccctctgcagtaacctgtccgtggagaacgctgcagaaattctcatcctggccgacctccacagtgcagatcagttgaaaactcaggcagtggatttcatcaactatcatgcttcggatgtcttggagacctctgggtggaagtcaatggtggtgtcacatccccacttggtggctgaggcataccgctctctggcttcagcacagtgcccttttctgggacccccacgcaaacgcctgaagcaatccggcagcggcagcccggcggcgaaacgcgtgaaactggat

SEQ ID NO: 1513 - DNA, 999 bp, synthetic construct
  source 1..999: mol_type = other DNA; note = FOXP3DBD-(GS)2-SPOP-NLS nucleic acid
atgcggccccccttcacctacgccacactgatcagatgggccatcctggaagccccagaaaaacagcgcacccttaacgagatctaccactggttcaccagaatgttcgcctttttccggaaccaccctgccacctggaagaacgccattcggcacaacctgtctctgcacaagtgcttcgtgcgggtcgagagcgagaagggagctgtgtggaccgtggacgagctggagttccggaagaagcggagccaaagaccaagcaggggcagcggcagcaacgggcttctccctgatgacaagcttaccctcttctgcgaggtgagtgttgtgcaagattctgtcaacatttctggccagaataccatgaacatggtaaaggttcctgagtgccggctggcagatgagttaggaggactgtgggagaattcccggttcacagactgctgcttgtgtgttgccggccaggaattccaggctcacaaggctatcttagcagctcgttctccggtttttagtgccatgtttgaacatgaaatggaggagagcaaaaagaatcgagttgaaatcaatgatgtggagcctgaagtttttaaggaaatgatgtgcttcatttacacggggaaggctccaaacctcgacaaaatggctgatgatttgctggcagctgctgacaagtatgccctggagcgcttaaaggtcatgtgtgaggatgccctctgcagtaacctgtccgtggagaacgctgcagaaattctcatcctggccgacctccacagtgcagatcagttgaaaactcaggcagtggatttcatcaactatcatgcttcggatgtcttggagacctctgggtggaagtcaatggtggtgtcacatccccacttggtggctgaggcataccgctctctggcttcagcacagtgcccttttctgggacccccacgcaaacgcctgaagcaatccggcagcggcagcccggcggcgaaacgcgtgaaactggat

SEQ ID NO: 1514 - DNA, 1005 bp, synthetic construct
  source 1..1005: mol_type = other DNA; note = FOXP3DBD-(GS)3-SPOP-NLS nucleic acid
atgcggccccccttcacctacgccacactgatcagatgggccatcctggaagccccagaaaaacagcgcacccttaacgagatctaccactggttcaccagaatgttcgcctttttccggaaccaccctgccacctggaagaacgccattcggcacaacctgtctctgcacaagtgcttcgtgcgggtcgagagcgagaagggagctgtgtggaccgtggacgagctggagttccggaagaagcggagccaaagaccaagcaggggcagcggcagcggcagcaacgggcttctccctgatgacaagcttaccctcttctgcgaggtgagtgttgtgcaagattctgtcaacatttctggccagaataccatgaacatggtaaaggttcctgagtgccggctggcagatgagttaggaggactgtgggagaattcccggttcacagactgctgcttgtgtgttgccggccaggaattccaggctcacaaggctatcttagcagctcgttctccggtttttagtgccatgtttgaacatgaaatggaggagagcaaaaagaatcgagttgaaatcaatgatgtggagcctgaagtttttaaggaaatgatgtgcttcatttacacggggaaggctccaaacctcgacaaaatggctgatgatttgctggcagctgctgacaagtatgccctggagcgcttaaaggtcatgtgtgaggatgccctctgcagtaacctgtccgtggagaacgctgcagaaattctcatcctggccgacctccacagtgcagatcagttgaaaactcaggcagtggatttcatcaactatcatgcttcggatgtcttggagacctctgggtggaagtcaatggtggtgtcacatccccacttggtggctgaggcataccgctctctggcttcagcacagtgcccttttctgggacccccacgcaaacgcctgaagcaatccggcagcggcagcccggcggcgaaacgcgtgaaactggat

SEQ ID NO: 1515 - DNA, 1011 bp, synthetic construct
  source 1..1011: mol_type = other DNA; note = FOXP3DBD-(GS)4-SPOP-NLS nucleic acid
atgcggccccccttcacctacgccacactgatcagatgggccatcctggaagccccagaaaaacagcgcacccttaacgagatctaccactggttcaccagaatgttcgcctttttccggaaccaccctgccacctggaagaacgccattcggcacaacctgtctctgcacaagtgcttcgtgcgggtcgagagcgagaagggagctgtgtggaccgtggacgagctggagttccggaagaagcggagccaaagaccaagcaggggcagcggcagcggcagcggcagcaacgggcttctccctgatgacaagcttaccctcttctgcgaggtgagtgttgtgcaagattctgtcaacatttctggccagaataccatgaacatggtaaaggttcctgagtgccggctggcagatgagttaggaggactgtgggagaattcccggttcacagactgctgcttgtgtgttgccggccaggaattccaggctcacaaggctatcttagcagctcgttctccggtttttagtgccatgtttgaacatgaaatggaggagagcaaaaagaatcgagttgaaatcaatgatgtggagcctgaagtttttaaggaaatgatgtgcttcatttacacggggaaggctccaaacctcgacaaaatggctgatgatttgctggcagctgctgacaagtatgccctggagcgcttaaaggtcatgtgtgaggatgccctctgcagtaacctgtccgtggagaacgctgcagaaattctcatcctggccgacctccacagtgcagatcagttgaaaactcaggcagtggatttcatcaactatcatgcttcggatgtcttggagacctctgggtggaagtcaatggtggtgtcacatccccacttggtggctgaggcataccgctctctggcttcagcacagtgcccttttctgggacccccacgcaaacgcctgaagcaatccggcagcggcagcccggcggcgaaacgcgtgaaactggat

SEQ ID NO: 1516 - DNA, 1017 bp, synthetic construct
  source 1..1017: mol_type = other DNA; note = FOXP3DBD-(GS)5-SPOP-NLS nucleic acid
atgcggccccccttcacctacgccacactgatcagatgggccatcctggaagccccagaaaaacagcgcacccttaacgagatctaccactggttcaccagaatgttcgcctttttccggaaccaccctgccacctggaagaacgccattcggcacaacctgtctctgcacaagtgcttcgtgcgggtcgagagcgagaagggagctgtgtggaccgtggacgagctggagttccggaagaagcggagccaaagaccaagcaggggcagcggcagcggcagcggcagcggcagcaacgggcttctccctgatgacaagcttaccctcttctgcgaggtgagtgttgtgcaagattctgtcaacatttctggccagaataccatgaacatggtaaaggttcctgagtgccggctggcagatgagttaggaggactgtgggagaattcccggttcacagactgctgcttgtgtgttgccggccaggaattccaggctcacaaggctatcttagcagctcgttctccggtttttagtgccatgtttgaacatgaaatggaggagagcaaaaagaatcgagttgaaatcaatgatgtggagcctgaagtttttaaggaaatgatgtgcttcatttacacggggaaggctccaaacctcgacaaaatggctgatgatttgctggcagctgctgacaagtatgccctggagcgcttaaaggtcatgtgtgaggatgccctctgcagtaacctgtccgtggagaacgctgcagaaattctcatcctggccgacctccacagtgcagatcagttgaaaactcaggcagtggatttcatcaactatcatgcttcggatgtcttggagacctctgggtggaagtcaatggtggtgtcacatccccacttggtggctgaggcataccgctctctggcttcagcacagtgcccttttctgggacccccacgcaaacgcctgaagcaatccggcagcggcagcccggcggcgaaacgcgtgaaactggat

SEQ ID NO: 1517 - DNA, 1023 bp, synthetic construct
  source 1..1023: mol_type = other DNA; note = FOXP3DBD-(GS)6-SPOP-NLS nucleic acid
atgcggccccccttcacctacgccacactgatcagatgggccatcctggaagccccagaaaaacagcgcacccttaacgagatctaccactggttcaccagaatgttcgcctttttccggaaccaccctgccacctggaagaacgccattcggcacaacctgtctctgcacaagtgcttcgtgcgggtcgagagcgagaagggagctgtgtggaccgtggacgagctggagttccggaagaagcggagccaaagaccaagcaggggcagcggcagcggcagcggcagcggcagcggcagcaacgggcttctccctgatgacaagcttaccctcttctgcgaggtgagtgttgtgcaagattctgtcaacatttctggccagaataccatgaacatggtaaaggttcctgagtgccggctggcagatgagttaggaggactgtgggagaattcccggttcacagactgctgcttgtgtgttgccggccaggaattccaggctcacaaggctatcttagcagctcgttctccggtttttagtgccatgtttgaacatgaaatggaggagagcaaaaagaatcgagttgaaatcaatgatgtggagcctgaagtttttaaggaaatgatgtgcttcatttacacggggaaggctccaaacctcgacaaaatggctgatgatttgctggcagctgctgacaagtatgccctggagcgcttaaaggtcatgtgtgaggatgccctctgcagtaacctgtccgtggagaacgctgcagaaattctcatcctggccgacctccacagtgcagatcagttgaaaactcaggcagtggatttcatcaactatcatgcttcggatgtcttggagacctctgggtggaagtcaatggtggtgtcacatccccacttggtggctgaggcataccgctctctggcttcagcacagtgcccttttctgggacccccacgcaaacgcctgaagcaatccggcagcggcagcccggcggcgaaacgcgtgaaactggat

SEQ ID NO: 1518 - DNA, 1023 bp, synthetic construct
  source 1..1023: mol_type = other DNA; note = FOXP3DBD-(GS)1-SPOP-NLS-HA nucleic acid
atgcggccccccttcacctacgccacactgatcagatgggccatcctggaagccccagaaaaacagcgcacccttaacgagatctaccactggttcaccagaatgttcgcctttttccggaaccaccctgccacctggaagaacgccattcggcacaacctgtctctgcacaagtgcttcgtgcgggtcgagagcgagaagggagctgtgtggaccgtggacgagctggagttccggaagaagcggagccaaagaccaagcaggggcagcaacgggcttctccctgatgacaagcttaccctcttctgcgaggtgagtgttgtgcaagattctgtcaacatttctggccagaataccatgaacatggtaaaggttcctgagtgccggctggcagatgagttaggaggactgtgggagaattcccggttcacagactgctgcttgtgtgttgccggccaggaattccaggctcacaaggctatcttagcagctcgttctccggtttttagtgccatgtttgaacatgaaatggaggagagcaaaaagaatcgagttgaaatcaatgatgtggagcctgaagtttttaaggaaatgatgtgcttcatttacacggggaaggctccaaacctcgacaaaatggctgatgatttgctggcagctgctgacaagtatgccctggagcgcttaaaggtcatgtgtgaggatgccctctgcagtaacctgtccgtggagaacgctgcagaaattctcatcctggccgacctccacagtgcagatcagttgaaaactcaggcagtggatttcatcaactatcatgcttcggatgtcttggagacctctgggtggaagtcaatggtggtgtcacatccccacttggtggctgaggcataccgctctctggcttcagcacagtgcccttttctgggacccccacgcaaacgcctgaagcaatccggcagcggcagcccggcggcgaaacgcgtgaaactggattacccatacgatgttccagattacgcttaa

SEQ ID NO: 1519 - DNA, 1029 bp, synthetic construct
  source 1..1029: mol_type = other DNA; note = FOXP3DBD-(GS)2-SPOP-NLS-HA nucleic acid
atgcggccccccttcacctacgccacactgatcagatgggccatcctggaagccccagaaaaacagcgcacccttaacgagatctaccactggttcaccagaatgttcgcctttttccggaaccaccctgccacctggaagaacgccattcggcacaacctgtctctgcacaagtgcttcgtgcgggtcgagagcgagaagggagctgtgtggaccgtggacgagctggagttccggaagaagcggagccaaagaccaagcaggggcagcggcagcaacgggcttctccctgatgacaagcttaccctcttctgcgaggtgagtgttgtgcaagattctgtcaacatttctggccagaataccatgaacatggtaaaggttcctgagtgccggctggcagatgagttaggaggactgtgggagaattcccggttcacagactgctgcttgtgtgttgccggccaggaattccaggctcacaaggctatcttagcagctcgttctccggtttttagtgccatgtttgaacatgaaatggaggagagcaaaaagaatcgagttgaaatcaatgatgtggagcctgaagtttttaaggaaatgatgtgcttcatttacacggggaaggctccaaacctcgacaaaatggctgatgatttgctggcagctgctgacaagtatgccctggagcgcttaaaggtcatgtgtgaggatgccctctgcagtaacctgtccgtggagaacgctgcagaaattctcatcctggccgacctccacagtgcagatcagttgaaaactcaggcagtggatttcatcaactatcatgcttcggatgtcttggagacctctgggtggaagtcaatggtggtgtcacatccccacttggtggctgaggcataccgctctctggcttcagcacagtgcccttttctgggacccccacgcaaacgcctgaagcaatccggcagcggcagcccggcggcgaaacgcgtgaaactggattacccatacgatgttccagattacgcttaa

SEQ ID NO: 1520 - DNA, 1035 bp, synthetic construct
  source 1..1035: mol_type = other DNA; note = FOXP3DBD-(GS)3-SPOP-NLS-HA nucleic acid
atgcggccccccttcacctacgccacactgatcagatgggccatcctggaagccccagaaaaacagcgcacccttaacgagatctaccactggttcaccagaatgttcgcctttttccggaaccaccctgccacctggaagaacgccattcggcacaacctgtctctgcacaagtgcttcgtgcgggtcgagagcgagaagggagctgtgtggaccgtggacgagctggagttccggaagaagcggagccaaagaccaagcaggggcagcggcagcggcagcaacgggcttctccctgatgacaagcttaccctcttctgcgaggtgagtgttgtgcaagattctgtcaacatttctggccagaataccatgaacatggtaaaggttcctgagtgccggctggcagatgagttaggaggactgtgggagaattcccggttcacagactgctgcttgtgtgttgccggccaggaattccaggctcacaaggctatcttagcagctcgttctccggtttttagtgccatgtttgaacatgaaatggaggagagcaaaaagaatcgagttgaaatcaatgatgtggagcctgaagtttttaaggaaatgatgtgcttcatttacacggggaaggctccaaacctcgacaaaatggctgatgatttgctggcagctgctgacaagtatgccctggagcgcttaaaggtcatgtgtgaggatgccctctgcagtaacctgtccgtggagaacgctgcagaaattctcatcctggccgacctccacagtgcagatcagttgaaaactcaggcagtggatttcatcaactatcatgcttcggatgtcttggagacctctgggtggaagtcaatggtggtgtcacatccccacttggtggctgaggcataccgctctctggcttcagcacagtgcccttttctgggacccccacgcaaacgcctgaagcaatccggcagcggcagcccggcggcgaaacgcgtgaaactggattacccatacgatgttccagattacgcttaa

SEQ ID NO: 1521 - DNA, 1041 bp, synthetic construct
  source 1..1041: mol_type = other DNA; note = FOXP3DBD-(GS)4-SPOP-NLS-HA nucleic acid
atgcggccccccttcacctacgccacactgatcagatgggccatcctggaagccccagaaaaacagcgcacccttaacgagatctaccactggttcaccagaatgttcgcctttttccggaaccaccctgccacctggaagaacgccattcggcacaacctgtctctgcacaagtgcttcgtgcgggtcgagagcgagaagggagctgtgtggaccgtggacgagctggagttccggaagaagcggagccaaagaccaagcaggggcagcggcagcggcagcggcagcaacgggcttctccctgatgacaagcttaccctcttctgcgaggtgagtgttgtgcaagattctgtcaacatttctggccagaataccatgaacatggtaaaggttcctgagtgccggctggcagatgagttaggaggactgtgggagaattcccggttcacagactgctgcttgtgtgttgccggccaggaattccaggctcacaaggctatcttagcagctcgttctccggtttttagtgccatgtttgaacatgaaatggaggagagcaaaaagaatcgagttgaaatcaatgatgtggagcctgaagtttttaaggaaatgatgtgcttcatttacacggggaaggctccaaacctcgacaaaatggctgatgatttgctggcagctgctgacaagtatgccctggagcgcttaaaggtcatgtgtgaggatgccctctgcagtaacctgtccgtggagaacgctgcagaaattctcatcctggccgacctccacagtgcagatcagttgaaaactcaggcagtggatttcatcaactatcatgcttcggatgtcttggagacctctgggtggaagtcaatggtggtgtcacatccccacttggtggctgaggcataccgctctctggcttcagcacagtgcccttttctgggacccccacgcaaacgcctgaagcaatccggcagcggcagcccggcggcgaaacgcgtgaaactggattacccatacgatgttccagattacgcttaa

SEQ ID NO: 1522 - DNA, 1047 bp, synthetic construct
  source 1..1047: mol_type = other DNA; note = FOXP3DBD-(GS)5-SPOP-NLS-HA nucleic acid
atgcggccccccttcacctacgccacactgatcagatgggccatcctggaagccccagaaaaacagcgcacccttaacgagatctaccactggttcaccagaatgttcgcctttttccggaaccaccctgccacctggaagaacgccattcggcacaacctgtctctgcacaagtgcttcgtgcgggtcgagagcgagaagggagctgtgtggaccgtggacgagctggagttccggaagaagcggagccaaagaccaagcaggggcagcggcagcggcagcggcagcggcagcaacgggcttctccctgatgacaagcttaccctcttctgcgaggtgagtgttgtgcaagattctgtcaacatttctggccagaataccatgaacatggtaaaggttcctgagtgccggctggcagatgagttaggaggactgtgggagaattcccggttcacagactgctgcttgtgtgttgccggccaggaattccaggctcacaaggctatcttagcagctcgttctccggtttttagtgccatgtttgaacatgaaatggaggagagcaaaaagaatcgagttgaaatcaatgatgtggagcctgaagtttttaaggaaatgatgtgcttcatttacacggggaaggctccaaacctcgacaaaatggctgatgatttgctggcagctgctgacaagtatgccctggagcgcttaaaggtcatgtgtgaggatgccctctgcagtaacctgtccgtggagaacgctgcagaaattctcatcctggccgacctccacagtgcagatcagttgaaaactcaggcagtggatttcatcaactatcatgcttcggatgtcttggagacctctgggtggaagtcaatggtggtgtcacatccccacttggtggctgaggcataccgctctctggcttcagcacagtgcccttttctgggacccccacgcaaacgcctgaagcaatccggcagcggcagcccggcggcgaaacgcgtgaaactggattacccatacgatgttccagattacgcttaa

SEQ ID NO: 1523 - DNA, 1053 bp, synthetic construct
  source 1..1053: mol_type = other DNA; note = FOXP3DBD-(GS)6-SPOP-NLS-HA nucleic acid
atgcggccccccttcacctacgccacactgatcagatgggccatcctggaagccccagaaaaacagcgcacccttaacgagatctaccactggttcaccagaatgttcgcctttttccggaaccaccctgccacctggaagaacgccattcggcacaacctgtctctgcacaagtgcttcgtgcgggtcgagagcgagaagggagctgtgtggaccgtggacgagctggagttccggaagaagcggagccaaagaccaagcaggggcagcggcagcggcagcggcagcggcagcggcagcaacgggcttctccctgatgacaagcttaccctcttctgcgaggtgagtgttgtgcaagattctgtcaacatttctggccagaataccatgaacatggtaaaggttcctgagtgccggctggcagatgagttaggaggactgtgggagaattcccggttcacagactgctgcttgtgtgttgccggccaggaattccaggctcacaaggctatcttagcagctcgttctccggtttttagtgccatgtttgaacatgaaatggaggagagcaaaaagaatcgagttgaaatcaatgatgtggagcctgaagtttttaaggaaatgatgtgcttcatttacacggggaaggctccaaacctcgacaaaatggctgatgatttgctggcagctgctgacaagtatgccctggagcgcttaaaggtcatgtgtgaggatgccctctgcagtaacctgtccgtggagaacgctgcagaaattctcatcctggccgacctccacagtgcagatcagttgaaaactcaggcagtggatttcatcaactatcatgcttcggatgtcttggagacctctgggtggaagtcaatggtggtgtcacatccccacttggtggctgaggcataccgctctctggcttcagcacagtgcccttttctgggacccccacgcaaacgcctgaagcaatccggcagcggcagcccggcggcgaaacgcgtgaaactggattacccatacgatgttccagattacgcttaa

SEQ ID NO: 1524 - DNA, 918 bp, synthetic construct
  source 1..918: mol_type = other DNA; note = VL12.3-(GS)1-CHIP-NLS nucleic acid
atgggcagccaacctgtgctgacacagagccccagcgtgtccgccgctcctcggcagcgggtgaccatcagcgtgtccggctctaatagcaacatcggctccaacaccgtgaactggatccagcagctgcctggaagagcccccgagctgctgatgtacgacgacgacctgctcgccccaggcgtgtctgatagattcagcggctctagaagcggcaccagcgccagcctgaccatcagcggactgcagtctgaagatgaggccgactactacgccgctacatgggacgatagcctgaacggctgggtgttcggcggcggaacaaaggtgaccgtcctgagcggcggcagccggctgaacttcggggacgacatccccagcgctcttcgaatcgcgaagaagaagcgctggaacagcattgaggagcggcgcatccaccaggagagcgagctgcactcctacctctccaggctcattgccgcggagcgtgagagggagctggaagagtgccagcgaaaccacgagggtgatgaggacgacagccacgtccgggcccagcaggcctgcattgaggccaagcacgacaagtacatggcggacatggacgagcttttttctcaggtggatgagaagaggaagaagcgagacatccccgactacctgtgtggcaagatcagctttgagctgatgcgggagccgtgcatcacgcccagtggcatcacctacgaccgcaaggacatcgaggagcacctgcagcgtgtgggtcattttgacccggtgaccaggagccccctgacccaggaacagctcatccccaacttggctatgaaggaggttattgacgcattcatctctgagaatggctgggtggaggactacggcagcggcagcccggcggcgaaacgcgtgaaactggat

SEQ ID NO: 1525 - DNA, 924 bp, synthetic construct
  source 1..924: mol_type = other DNA; note = VL12.3-(GS)2-CHIP-NLS nucleic acid
atgggcagccaacctgtgctgacacagagccccagcgtgtccgccgctcctcggcagcgggtgaccatcagcgtgtccggctctaatagcaacatcggctccaacaccgtgaactggatccagcagctgcctggaagagcccccgagctgctgatgtacgacgacgacctgctcgccccaggcgtgtctgatagattcagcggctctagaagcggcaccagcgccagcctgaccatcagcggactgcagtctgaagatgaggccgactactacgccgctacatgggacgatagcctgaacggctgggtgttcggcggcggaacaaaggtgaccgtcctgagcggcggcagcggcagccggctgaacttcggggacgacatccccagcgctcttcgaatcgcgaagaagaagcgctggaacagcattgaggagcggcgcatccaccaggagagcgagctgcactcctacctctccaggctcattgccgcggagcgtgagagggagctggaagagtgccagcgaaaccacgagggtgatgaggacgacagccacgtccgggcccagcaggcctgcattgaggccaagcacgacaagtacatggcggacatggacgagcttttttctcaggtggatgagaagaggaagaagcgagacatccccgactacctgtgtggcaagatcagctttgagctgatgcgggagccgtgcatcacgcccagtggcatcacctacgaccgcaaggacatcgaggagcacctgcagcgtgtgggtcattttgacccggtgaccaggagccccctgacccaggaacagctcatccccaacttggctatgaaggaggttattgacgcattcatctctgagaatggctgggtggaggactacggcagcggcagcccggcggcgaaacgcgtgaaactggat

SEQ ID NO: 1526 - DNA, 930 bp, synthetic construct
  source 1..930: mol_type = other DNA; note = VL12.3-(GS)3-CHIP-NLS nucleic acid
atgggcagccaacctgtgctgacacagagccccagcgtgtccgccgctcctcggcagcgggtgaccatcagcgtgtccggctctaatagcaacatcggctccaacaccgtgaactggatccagcagctgcctggaagagcccccgagctgctgatgtacgacgacgacctgctcgccccaggcgtgtctgatagattcagcggctctagaagcggcaccagcgccagcctgaccatcagcggactgcagtctgaagatgaggccgactactacgccgctacatgggacgatagcctgaacggctgggtgttcggcggcggaacaaaggtgaccgtcctgagcggcggcagcggcagcggcagccggctgaacttcggggacgacatccccagcgctcttcgaatcgcgaagaagaagcgctggaacagcattgaggagcggcgcatccaccaggagagcgagctgcactcctacctctccaggctcattgccgcggagcgtgagagggagctggaagagtgccagcgaaaccacgagggtgatgaggacgacagccacgtccgggcccagcaggcctgcattgaggccaagcacgacaagtacatggcggacatggacgagcttttttctcaggtggatgagaagaggaagaagcgagacatccccgactacctgtgtggcaagatcagctttgagctgatgcgggagccgtgcatcacgcccagtggcatcacctacgaccgcaaggacatcgaggagcacctgcagcgtgtgggtcattttgacccggtgaccaggagccccctgacccaggaacagctcatccccaacttggctatgaaggaggttattgacgcattcatctctgagaatggctgggtggaggactacggcagcggcagcccggcggcgaaacgcgtgaaactggat

SEQ ID NO: 1527 - DNA, 936 bp, synthetic construct
  source 1..936: mol_type = other DNA; note = VL12.3-(GS)4-CHIP-NLS nucleic acid
atgggcagccaacctgtgctgacacagagccccagcgtgtccgccgctcctcggcagcgggtgaccatcagcgtgtccggctctaatagcaacatcggctccaacaccgtgaactggatccagcagctgcctggaagagcccccgagctgctgatgtacgacgacgacctgctcgccccaggcgtgtctgatagattcagcggctctagaagcggcaccagcgccagcctgaccatcagcggactgcagtctgaagatgaggccgactactacgccgctacatgggacgatagcctgaacggctgggtgttcggcggcggaacaaaggtgaccgtcctgagcggcggcagcggcagcggcagcggcagccggctgaacttcggggacgacatccccagcgctcttcgaatcgcgaagaagaagcgctggaacagcattgaggagcggcgcatccaccaggagagcgagctgcactcctacctctccaggctcattgccgcggagcgtgagagggagctggaagagtgccagcgaaaccacgagggtgatgaggacgacagccacgtccgggcccagcaggcctgcattgaggccaagcacgacaagtacatggcggacatggacgagcttttttctcaggtggatgagaagaggaagaagcgagacatccccgactacctgtgtggcaagatcagctttgagctgatgcgggagccgtgcatcacgcccagtggcatcacctacgaccgcaaggacatcgaggagcacctgcagcgtgtgggtcattttgacccggtgaccaggagccccctgacccaggaacagctcatccccaacttggctatgaaggaggttattgacgcattcatctctgagaatggctgggtggaggactacggcagcggcagcccggcggcgaaacgcgtgaaactggat

SEQ ID NO: 1528 - DNA, 942 bp, synthetic construct
  source 1..942: mol_type = other DNA; note = VL12.3-(GS)5-CHIP-NLS nucleic acid
atgggcagccaacctgtgctgacacagagccccagcgtgtccgccgctcctcggcagcgggtgaccatcagcgtgtccggctctaatagcaacatcggctccaacaccgtgaactggatccagcagctgcctggaagagcccccgagctgctgatgtacgacgacgacctgctcgccccaggcgtgtctgatagattcagcggctctagaagcggcaccagcgccagcctgaccatcagcggactgcagtctgaagatgaggccgactactacgccgctacatgggacgatagcctgaacggctgggtgttcggcggcggaacaaaggtgaccgtcctgagcggcggcagcggcagcggcagcggcagcggcagccggctgaacttcggggacgacatccccagcgctcttcgaatcgcgaagaagaagcgctggaacagcattgaggagcggcgcatccaccaggagagcgagctgcactcctacctctccaggctcattgccgcggagcgtgagagggagctggaagagtgccagcgaaaccacgagggtgatgaggacgacagccacgtccgggcccagcaggcctgcattgaggccaagcacgacaagtacatggcggacatggacgagcttttttctcaggtggatgagaagaggaagaagcgagacatccccgactacctgtgtggcaagatcagctttgagctgatgcgggagccgtgcatcacgcccagtggcatcacctacgaccgcaaggacatcgaggagcacctgcagcgtgtgggtcattttgacccggtgaccaggagccccctgacccaggaacagctcatccccaacttggctatgaaggaggttattgacgcattcatctctgagaatggctgggtggaggactacggcagcggcagcccggcggcgaaacgcgtgaaactggat

SEQ ID NO: 1529 - DNA, 948 bp, synthetic construct
  source 1..948: mol_type = other DNA; note = VL12.3-(GS)6-CHIP-NLS nucleic acid
atgggcagccaacctgtgctgacacagagccccagcgtgtccgccgctcctcggcagcgggtgaccatcagcgtgtccggctctaatagcaacatcggctccaacaccgtgaactggatccagcagctgcctggaagagcccccgagctgctgatgtacgacgacgacctgctcgccccaggcgtgtctgatagattcagcggctctagaagcggcaccagcgccagcctgaccatcagcggactgcagtctgaagatgaggccgactactacgccgctacatgggacgatagcctgaacggctgggtgttcggcggcggaacaaaggtgaccgtcctgagcggcggcagcggcagcggcagcggcagcggcagcggcagccggctgaacttcggggacgacatccccagcgctcttcgaatcgcgaagaagaagcgctggaacagcattgaggagcggcgcatccaccaggagagcgagctgcactcctacctctccaggctcattgccgcggagcgtgagagggagctggaagagtgccagcgaaaccacgagggtgatgaggacgacagccacgtccgggcccagcaggcctgcattgaggccaagcacgacaagtacatggcggacatggacgagcttttttctcaggtggatgagaagaggaagaagcgagacatccccgactacctgtgtggcaagatcagctttgagctgatgcgggagccgtgcatcacgcccagtggcatcacctacgaccgcaaggacatcgaggagcacctgcagcgtgtgggtcattttgacccggtgaccaggagccccctgacccaggaacagctcatccccaacttggctatgaaggaggttattgacgcattcatctctgagaatggctgggtggaggactacggcagcggcagcccggcggcgaaacgcgtgaaactggat

SEQ ID NO: 1530 - DNA, 948 bp, synthetic construct
  source 1..948: mol_type = other DNA; note = VL12.3-(GS)1-CHIP-NLS-HA nucleic acid
atgggcagccaacctgtgctgacacagagccccagcgtgtccgccgctcctcggcagcgggtgaccatcagcgtgtccggctctaatagcaacatcggctccaacaccgtgaactggatccagcagctgcctggaagagcccccgagctgctgatgtacgacgacgacctgctcgccccaggcgtgtctgatagattcagcggctctagaagcggcaccagcgccagcctgaccatcagcggactgcagtctgaagatgaggccgactactacgccgctacatgggacgatagcctgaacggctgggtgttcggcggcggaacaaaggtgaccgtcctgagcggcggcagccggctgaacttcggggacgacatccccagcgctcttcgaatcgcgaagaagaagcgctggaacagcattgaggagcggcgcatccaccaggagagcgagctgcactcctacctctccaggctcattgccgcggagcgtgagagggagctggaagagtgccagcgaaaccacgagggtgatgaggacgacagccacgtccgggcccagcaggcctgcattgaggccaagcacgacaagtacatggcggacatggacgagcttttttctcaggtggatgagaagaggaagaagcgagacatccccgactacctgtgtggcaagatcagctttgagctgatgcgggagccgtgcatcacgcccagtggcatcacctacgaccgcaaggacatcgaggagcacctgcagcgtgtgggtcattttgacccggtgaccaggagccccctgacccaggaacagctcatccccaacttggctatgaaggaggttattgacgcattcatctctgagaatggctgggtggaggactacggcagcggcagcccggcggcgaaacgcgtgaaactggattacccatacgatgttccagattacgcttaa

SEQ ID NO: 1531 - DNA, 954 bp, synthetic construct
  source 1..954: mol_type = other DNA; note = VL12.3-(GS)2-CHIP-NLS-HA nucleic acid
atgggcagccaacctgtgctgacacagagccccagcgtgtccgccgctcctcggcagcgggtgaccatcagcgtgtccggctctaatagcaacatcggctccaacaccgtgaactggatccagcagctgcctggaagagcccccgagctgctgatgtacgacgacgacctgctcgccccaggcgtgtctgatagattcagcggctctagaagcggcaccagcgccagcctgaccatcagcggactgcagtctgaagatgaggccgactactacgccgctacatgggacgatagcctgaacggctgggtgttcggcggcggaacaaaggtgaccgtcctgagcggcggcagcggcagccggctgaacttcggggacgacatccccagcgctcttcgaatcgcgaagaagaagcgctggaacagcattgaggagcggcgcatccaccaggagagcgagctgcactcctacctctccaggctcattgccgcggagcgtgagagggagctggaagagtgccagcgaaaccacgagggtgatgaggacgacagccacgtccgggcccagcaggcctgcattgaggccaagcacgacaagtacatggcggacatggacgagcttttttctcaggtggatgagaagaggaagaagcgagacatccccgactacctgtgtggcaagatcagctttgagctgatgcgggagccgtgcatcacgcccagtggcatcacctacgaccgcaaggacatcgaggagcacctgcagcgtgtgggtcattttgacccggtgaccaggagccccctgacccaggaacagctcatccccaacttggctatgaaggaggttattgacgcattcatctctgagaatggctgggtggaggactacggcagcggcagcccggcggcgaaacgcgtgaaactggattacccatacgatgttccagattacgcttaa

SEQ ID NO: 1532 - DNA, 960 bp, synthetic construct
  source 1..960: mol_type = other DNA; note = VL12.3-(GS)3-CHIP-NLS-HA nucleic acid
atgggcagccaacctgtgctgacacagagccccagcgtgtccgccgctcctcggcagcgggtgaccatcagcgtgtccggctctaatagcaacatcggctccaacaccgtgaactggatccagcagctgcctggaagagcccccgagctgctgatgtacgacgacgacctgctcgccccaggcgtgtctgatagattcagcggctctagaagcggcaccagcgccagcctgaccatcagcggactgcagtctgaagatgaggccgactactacgccgctacatgggacgatagcctgaacggctgggtgttcggcggcggaacaaaggtgaccgtcctgagcggcggcagcggcagcggcagccggctgaacttcggggacgacatccccagcgctcttcgaatcgcgaagaagaagcgctggaacagcattgaggagcggcgcatccaccaggagagcgagctgcactcctacctctccaggctcattgccgcggagcgtgagagggagctggaagagtgccagcgaaaccacgagggtgatgaggacgacagccacgtccgggcccagcaggcctgcattgaggccaagcacgacaagtacatggcggacatggacgagcttttttctcaggtggatgagaagaggaagaagcgagacatccccgactacctgtgtggcaagatcagctttgagctgatgcgggagccgtgcatcacgcccagtggcatcacctacgaccgcaaggacatcgaggagcacctgcagcgtgtgggtcattttgacccggtgaccaggagccccctgacccaggaacagctcatccccaacttggctatgaaggaggttattgacgcattcatctctgagaatggctgggtggaggactacggcagcggcagcccggcggcgaaacgcgtgaaactggattacccatacgatgttccagattacgcttaa

SEQ ID NO: 1533 - DNA, 966 bp, synthetic construct
  source 1..966: mol_type = other DNA; note = VL12.3-(GS)4-CHIP-NLS-HA nucleic acid
atgggcagccaacctgtgctgacacagagccccagcgtgtccgccgctcctcggcagcgggtgaccatcagcgtgtccggctctaatagcaacatcggctccaacaccgtgaactggatccagcagctgcctggaagagcccccgagctgctgatgtacgacgacgacctgctcgccccaggcgtgtctgatagattcagcggctctagaagcggcaccagcgccagcctgaccatcagcggactgcagtctgaagatgaggccgactactacgccgctacatgggacgatagcctgaacggctgggtgttcggcggcggaacaaaggtgaccgtcctgagcggcggcagcggcagcggcagcggcagccggctgaacttcggggacgacatccccagcgctcttcgaatcgcgaagaagaagcgctggaacagcattgaggagcggcgcatccaccaggagagcgagctgcactcctacctctccaggctcattgccgcggagcgtgagagggagctggaagagtgccagcgaaaccacgagggtgatgaggacgacagccacgtccgggcccagcaggcctgcattgaggccaagcacgacaagtacatggcggacatggacgagcttttttctcaggtggatgagaagaggaagaagcgagacatccccgactacctgtgtggcaagatcagctttgagctgatgcgggagccgtgcatcacgcccagtggcatcacctacgaccgcaaggacatcgaggagcacctgcagcgtgtgggtcattttgacccggtgaccaggagccccctgacccaggaacagctcatccccaacttggctatgaaggaggttattgacgcattcatctctgagaatggctgggtggaggactacggcagcggcagcccggcggcgaaacgcgtgaaactggattacccatacgatgttccagattacgcttaa

SEQ ID NO: 1534 - DNA, 972 bp, synthetic construct
  source 1..972: mol_type = other DNA; note = VL12.3-(GS)5-CHIP-NLS-HA nucleic acid
atgggcagccaacctgtgctgacacagagccccagcgtgtccgccgctcctcggcagcgggtgaccatcagcgtgtccggctctaatagcaacatcggctccaacaccgtgaactggatccagcagctgcctggaagagcccccgagctgctgatgtacgacgacgacctgctcgccccaggcgtgtctgatagattcagcggctctagaagcggcaccagcgccagcctgaccatcagcggactgcagtctgaagatgaggccgactactacgccgctacatgggacgatagcctgaacggctgggtgttcggcggcggaacaaaggtgaccgtcctgagcggcggcagcggcagcggcagcggcagcggcagccggctgaacttcggggacgacatccccagcgctcttcgaatcgcgaagaagaagcgctggaacagcattgaggagcggcgcatccaccaggagagcgagctgcactcctacctctccaggctcattgccgcggagcgtgagagggagctggaagagtgccagcgaaaccacgagggtgatgaggacgacagccacgtccgggcccagcaggcctgcattgaggccaagcacgacaagtacatggcggacatggacgagcttttttctcaggtggatgagaagaggaagaagcgagacatccccgactacctgtgtggcaagatcagctttgagctgatgcgggagccgtgcatcacgcccagtggcatcacctacgaccgcaaggacatcgaggagcacctgcagcgtgtgggtcattttgacccggtgaccaggagccccctgacccaggaacagctcatccccaacttggctatgaaggaggttattgacgcattcatctctgagaatggctgggtggaggactacggcagcggcagcccggcggcgaaacgcgtgaaactggattacccatacgatgttccagattacgcttaa

SEQ ID NO: 1535 - DNA, 978 bp, synthetic construct
  source 1..978: mol_type = other DNA; note = VL12.3-(GS)6-CHIP-NLS-HA nucleic acid
atgggcagccaacctgtgctgacacagagccccagcgtgtccgccgctcctcggcagcgggtgaccatcagcgtgtccggctctaatagcaacatcggctccaacaccgtgaactggatccagcagctgcctggaagagcccccgagctgctgatgtacgacgacgacctgctcgccccaggcgtgtctgatagattcagcggctctagaagcggcaccagcgccagcctgaccatcagcggactgcagtctgaagatgaggccgactactacgccgctacatgggacgatagcctgaacggctgggtgttcggcggcggaacaaaggtgaccgtcctgagcggcggcagcggcagcggcagcggcagcggcagcggcagccggctgaacttcggggacgacatccccagcgctcttcgaatcgcgaagaagaagcgctggaacagcattgaggagcggcgcatccaccaggagagcgagctgcactcctacctctccaggctcattgccgcggagcgtgagagggagctggaagagtgccagcgaaaccacgagggtgatgaggacgacagccacgtccgggcccagcaggcctgcattgaggccaagcacgacaagtacatggcggacatggacgagcttttttctcaggtggatgagaagaggaagaagcgagacatccccgactacctgtgtggcaagatcagctttgagctgatgcgggagccgtgcatcacgcccagtggcatcacctacgaccgcaaggacatcgaggagcacctgcagcgtgtgggtcattttgacccggtgaccaggagccccctgacccaggaacagctcatccccaacttggctatgaaggaggttattgacgcattcatctctgagaatggctgggtggaggactacggcagcggcagcccggcggcgaaacgcgtgaaactggattacccatacgatgttccagattacgcttaa

SEQ ID NO: 1536 - DNA, 501 bp, synthetic construct
  source 1..501: mol_type = other DNA; note = NLS-DCAF1-(GS)1-VL12.3 nucleic acid
ccggcggcgaaacgcgtgaaactggatggcagcggcagcggcagccaggcgccgattaactttaccagccgcctgaaccgccgcgcgagctttccgaaatatggcggcgtggatggcggctgctttgatcgccatctgatttttagccgcggcagcggcagccaacctgtgctgacacagagccccagcgtgtccgccgctcctcggcagcgggtgaccatcagcgtgtccggctctaatagcaacatcggctccaacaccgtgaactggatccagcagctgcctggaagagcccccgagctgctgatgtacgacgacgacctgctcgccccaggcgtgtctgatagattcagcggctctagaagcggcaccagcgccagcctgaccatcagcggactgcagtctgaagatgaggccgactactacgccgctacatgggacgatagcctgaacggctgggtgttcggcggcggaacaaaggtgaccgtcctgagcggctaa

SEQ ID NO: 1537 - DNA, 507 bp, synthetic construct
  source 1..507: mol_type = other DNA; note = NLS-DCAF1-(GS)2-VL12.3 nucleic acid
ccggcggcgaaacgcgtgaaactggatggcagcggcagcggcagccaggcgccgattaactttaccagccgcctgaaccgccgcgcgagctttccgaaatatggcggcgtggatggcggctgctttgatcgccatctgatttttagccgcggcagcggcagcggcagccaacctgtgctgacacagagccccagcgtgtccgccgctcctcggcagcgggtgaccatcagcgtgtccggctctaatagcaacatcggctccaacaccgtgaactggatccagcagctgcctggaagagcccccgagctgctgatgtacgacgacgacctgctcgccccaggcgtgtctgatagattcagcggctctagaagcggcaccagcgccagcctgaccatcagcggactgcagtctgaagatgaggccgactactacgccgctacatgggacgatagcctgaacggctgggtgttcggcggcggaacaaaggtgaccgtcctgagcggctaa

SEQ ID NO: 1538 - DNA, 513 bp, synthetic construct
  source 1..513: mol_type = other DNA; note = NLS-DCAF1-(GS)3-VL12.3 nucleic acid
ccggcggcgaaacgcgtgaaactggatggcagcggcagcggcagccaggcgccgattaactttaccagccgcctgaaccgccgcgcgagctttccgaaatatggcggcgtggatggcggctgctttgatcgccatctgatttttagccgcggcagcggcagcggcagcggcagccaacctgtgctgacacagagccccagcgtgtccgccgctcctcggcagcgggtgaccatcagcgtgtccggctctaatagcaacatcggctccaacaccgtgaactggatccagcagctgcctggaagagcccccgagctgctgatgtacgacgacgacctgctcgccccaggcgtgtctgatagattcagcggctctagaagcggcaccagcgccagcctgaccatcagcggactgcagtctgaagatgaggccgactactacgccgctacatgggacgatagcctgaacggctgggtgttcggcggcggaacaaaggtgaccgtcctgagcggctaa

SEQ ID NO: 1539 - DNA, 519 bp, synthetic construct
  source 1..519: mol_type = other DNA; note = NLS-DCAF1-(GS)4-VL12.3 nucleic acid
ccggcggcgaaacgcgtgaaactggatggcagcggcagcggcagccaggcgccgattaactttaccagccgcctgaaccgccgcgcgagctttccgaaatatggcggcgtggatggcggctgctttgatcgccatctgatttttagccgcggcagcggcagcggcagcggcagcggcagccaacctgtgctgacacagagccccagcgtgtccgccgctcctcggcagcgggtgaccatcagcgtgtccggctctaatagcaacatcggctccaacaccgtgaactggatccagcagctgcctggaagagcccccgagctgctgatgtacgacgacgacctgctcgccccaggcgtgtctgatagattcagcggctctagaagcggcaccagcgccagcctgaccatcagcggactgcagtctgaagatgaggccgactactacgccgctacatgggacgatagcctgaacggctgggtgttcggcggcggaacaaaggtgaccgtcctgagcggctaa

SEQ ID NO: 1540 - DNA, 525 bp, synthetic construct
  source 1..525: mol_type = other DNA; note = NLS-DCAF1-(GS)5-VL12.3 nucleic acid
ccggcggcgaaacgcgtgaaactggatggcagcggcagcggcagccaggcgccgattaactttaccagccgcctgaaccgccgcgcgagctttccgaaatatggcggcgtggatggcggctgctttgatcgccatctgatttttagccgcggcagcggcagcggcagcggcagcggcagcggcagccaacctgtgctgacacagagccccagcgtgtccgccgctcctcggcagcgggtgaccatcagcgtgtccggctctaatagcaacatcggctccaacaccgtgaactggatccagcagctgcctggaagagcccccgagctgctgatgtacgacgacgacctgctcgccccaggcgtgtctgatagattcagcggctctagaagcggcaccagcgccagcctgaccatcagcggactgcagtctgaagatgaggccgactactacgccgctacatgggacgatagcctgaacggctgggtgttcggcggcggaacaaaggtgaccgtcctgagcggctaa

SEQ ID NO: 1541 - DNA, 531 bp, synthetic construct
  source 1..531: mol_type = other DNA; note = NLS-DCAF1-(GS)6-VL12.3 nucleic acid
ccggcggcgaaacgcgtgaaactggatggcagcggcagcggcagccaggcgccgattaactttaccagccgcctgaaccgccgcgcgagctttccgaaatatggcggcgtggatggcggctgctttgatcgccatctgatttttagccgcggcagcggcagcggcagcggcagcggcagcggcagcggcagccaacctgtgctgacacagagccccagcgtgtccgccgctcctcggcagcgggtgaccatcagcgtgtccggctctaatagcaacatcggctccaacaccgtgaactggatccagcagctgcctggaagagcccccgagctgctgatgtacgacgacgacctgctcgccccaggcgtgtctgatagattcagcggctctagaagcggcaccagcgccagcctgaccatcagcggactgcagtctgaagatgaggccgactactacgccgctacatgggacgatagcctgaacggctgggtgttcggcggcggaacaaaggtgaccgtcctgagcggctaa

SEQ ID NO: 1542 - DNA, 531 bp, synthetic construct
  source 1..531: mol_type = other DNA; note = HA-NLS-DCAF1-(GS)1-VL12.3 nucleic acid
atgtacccatacgatgttccagattacgctccggcggcgaaacgcgtgaaactggatggcagcggcagcggcagccaggcgccgattaactttaccagccgcctgaaccgccgcgcgagctttccgaaatatggcggcgtggatggcggctgctttgatcgccatctgatttttagccgcggcagcggcagccaacctgtgctgacacagagccccagcgtgtccgccgctcctcggcagcgggtgaccatcagcgtgtccggctctaatagcaacatcggctccaacaccgtgaactggatccagcagctgcctggaagagcccccgagctgctgatgtacgacgacgacctgctcgccccaggcgtgtctgatagattcagcggctctagaagcggcaccagcgccagcctgaccatcagcggactgcagtctgaagatgaggccgactactacgccgctacatgggacgatagcctgaacggctgggtgttcggcggcggaacaaaggtgaccgtcctgagcggctaa

SEQ ID NO: 1543 - DNA, 537 bp, synthetic construct
  source 1..537: mol_type = other DNA; note = HA-NLS-DCAF1-(GS)2-VL12.3 nucleic acid
atgtacccatacgatgttccagattacgctccggcggcgaaacgcgtgaaactggatggcagcggcagcggcagccaggcgccgattaactttaccagccgcctgaaccgccgcgcgagctttccgaaatatggcggcgtggatggcggctgctttgatcgccatctgatttttagccgcggcagcggcagcggcagccaacctgtgctgacacagagccccagcgtgtccgccgctcctcggcagcgggtgaccatcagcgtgtccggctctaatagcaacatcggctccaacaccgtgaactggatccagcagctgcctggaagagcccccgagctgctgatgtacgacgacgacctgctcgccccaggcgtgtctgatagattcagcggctctagaagcggcaccagcgccagcctgaccatcagcggactgcagtctgaagatgaggccgactactacgccgctacatgggacgatagcctgaacggctgggtgttcggcggcggaacaaaggtgaccgtcctgagcggctaa

SEQ ID NO: 1544 - DNA, 543 bp, synthetic construct
  source 1..543: mol_type = other DNA; note = HA-NLS-DCAF1-(GS)3-VL12.3 nucleic acid
atgtacccatacgatgttccagattacgctccggcggcgaaacgcgtgaaactggatggcagcggcagcggcagccaggcgccgattaactttaccagccgcctgaaccgccgcgcgagctttccgaaatatggcggcgtggatggcggctgctttgatcgccatctgatttttagccgcggcagcggcagcggcagcggcagccaacctgtgctgacacagagccccagcgtgtccgccgctcctcggcagcgggtgaccatcagcgtgtccggctctaatagcaacatcggctccaacaccgtgaactggatccagcagctgcctggaagagcccccgagctgctgatgtacgacgacgacctgctcgccccaggcgtgtctgatagattcagcggctctagaagcggcaccagcgccagcctgaccatcagcggactgcagtctgaagatgaggccgactactacgccgctacatgggacgatagcctgaacggctgggtgttcggcggcggaacaaaggtgaccgtcctgagcggctaa

SEQ ID NO: 1545 - DNA, 549 bp, synthetic construct
  source 1..549: mol_type = other DNA; note = HA-NLS-DCAF1-(GS)4-VL12.3 nucleic acid
atgtacccatacgatgttccagattacgctccggcggcgaaacgcgtgaaactggatggcagcggcagcggcagccaggcgccgattaactttaccagccgcctgaaccgccgcgcgagctttccgaaatatggcggcgtggatggcggctgctttgatcgccatctgatttttagccgcggcagcggcagcggcagcggcagcggcagccaacctgtgctgacacagagccccagcgtgtccgccgctcctcggcagcgggtgaccatcagcgtgtccggctctaatagcaacatcggctccaacaccgtgaactggatccagcagctgcctggaagagcccccgagctgctgatgtacgacgacgacctgctcgccccaggcgtgtctgatagattcagcggctctagaagcggcaccagcgccagcctgaccatcagcggactgcagtctgaagatgaggccgactactacgccgctacatgggacgatagcctgaacggctgggtgttcggcggcggaacaaaggtgaccgtcctgagcggctaa

SEQ ID NO: 1546 - DNA, 555 bp, synthetic construct
  source 1..555: mol_type = other DNA; note = HA-NLS-DCAF1-(GS)5-VL12.3 nucleic acid
atgtacccatacgatgttccagattacgctccggcggcgaaacgcgtgaaactggatggcagcggcagcggcagccaggcgccgattaactttaccagccgcctgaaccgccgcgcgagctttccgaaatatggcggcgtggatggcggctgctttgatcgccatctgatttttagccgcggcagcggcagcggcagcggcagcggcagcggcagccaacctgtgctgacacagagccccagcgtgtccgccgctcctcggcagcgggtgaccatcagcgtgtccggctctaatagcaacatcggctccaacaccgtgaactggatccagcagctgcctggaagagcccccgagctgctgatgtacgacgacgacctgctcgccccaggcgtgtctgatagattcagcggctctagaagcggcaccagcgccagcctgaccatcagcggactgcagtctgaagatgaggccgactactacgccgctacatgggacgatagcctgaacggctgggtgttcggcggcggaacaaaggtgaccgtcctgagcggctaa

SEQ ID NO: 1547 - DNA, 561 bp, synthetic construct
  source 1..561: mol_type = other DNA; note = HA-NLS-DCAF1-(GS)6-VL12.3 nucleic acid
atgtacccatacgatgttccagattacgctccggcggcgaaacgcgtgaaactggatggcagcggcagcggcagccaggcgccgattaactttaccagccgcctgaaccgccgcgcgagctttccgaaatatggcggcgtggatggcggctgctttgatcgccatctgatttttagccgcggcagcggcagcggcagcggcagcggcagcggcagcggcagccaacctgtgctgacacagagccccagcgtgtccgccgctcctcggcagcgggtgaccatcagcgtgtccggctctaatagcaacatcggctccaacaccgtgaactggatccagcagctgcctggaagagcccccgagctgctgatgtacgacgacgacctgctcgccccaggcgtgtctgatagattcagcggctctagaagcggcaccagcgccagcctgaccatcagcggactgcagtctgaagatgaggccgactactacgccgctacatgggacgatagcctgaacggctgggtgttcggcggcggaacaaaggtgaccgtcctgagcggctaa

SEQ ID NO: 1548 - DNA, 1464 bp, synthetic construct
  source 1..1464: mol_type = other DNA; note = NLS-VL12.3-(GS)1-E6AP nucleic acid
ccggcggcgaaacgcgtgaaactggatggcagcggcagcggcagcggcagccaacctgtgctgacacagagccccagcgtgtccgccgctcctcggcagcgggtgaccatcagcgtgtccggctctaatagcaacatcggctccaacaccgtgaactggatccagcagctgcctggaagagcccccgagctgctgatgtacgacgacgacctgctcgccccaggcgtgtctgatagattcagcggctctagaagcggcaccagcgccagcctgaccatcagcggactgcagtctgaagatgaggccgactactacgccgctacatgggacgatagcctgaacggctgggtgttcggcggcggaacaaaggtgaccgtcctgagcggcggcagcaatccatatttgagactcaaagttagacgtgaccatatcatagatgatgcacttgtccggctagagatgatcgctatggaaaatcctgcagacttgaagaagcagttgtatgtggaatttgaaggagaacaaggagttgatgagggaggtgtttccaaagaattttttcagctggttgtggaggaaatcttcaatccagatattggtatgttcacatacgatgaatctacaaaattgttttggtttaatccatcttcttttgaaactgagggtcagtttactctgattggcatagtactgggtctggctatttacaataactgtatactggatgtacattttcccatggttgtctacaggaagctaatggggaaaaaaggaacttttcgtgacttgggagactctcacccagttctatatcagagtttaaaagatttattggagtatgaagggaatgtggaagatgacatgatgatcactttccagatatcacagacagatctttttggtaacccaatgatgtatgatctaaaggaaaatggtgataaaattccaattacaaatgaaaacaggaaggaatttgtcaatctttattctgactacattctcaataaatcagtagaaaaacagttcaaggcttttcggagaggttttcatatggtgaccaatgaatctcccttaaagtacttattcagaccagaagaaattgaattgcttatatgtggaagccggaatctagatttccaagcactagaagaaactacagaatatgacggtggctataccagggactctgttctgattagggagttctgggaaatcgttcattcatttacagatgaacagaaaagactcttcttgcagtttacaacgggcacagacagagcacctgtgggaggactaggaaaattaaagatgattatagccaaaaatggcccagacacagaaaggttacctacatctcatacttgctttaatgtgcttttacttccggaatactcaagcaaagaaaaacttaaagagagattgttgaaggccatcacgtatgccaaaggatttggcatgctgtaa

SEQ ID NO: 1549 - DNA, 1470 bp, synthetic construct
  source 1..1470: mol_type = other DNA; note = NLS-VL12.3-(GS)2-E6AP nucleic acid
ccggcggcgaaacgcgtgaaactggatggcagcggcagcggcagcggcagccaacctgtgctgacacagagccccagcgtgtccgccgctcctcggcagcgggtgaccatcagcgtgtccggctctaatagcaacatcggctccaacaccgtgaactggatccagcagctgcctggaagagcccccgagctgctgatgtacgacgacgacctgctcgccccaggcgtgtctgatagattcagcggctctagaagcggcaccagcgccagcctgaccatcagcggactgcagtctgaagatgaggccgactactacgccgctacatgggacgatagcctgaacggctgggtgttcggcggcggaacaaaggtgaccgtcctgagcggcggcagcggcagcaatccatatttgagactcaaagttagacgtgaccatatcatagatgatgcacttgtccggctagagatgatcgctatggaaaatcctgcagacttgaagaagcagttgtatgtggaatttgaaggagaacaaggagttgatgagggaggtgtttccaaagaattttttcagctggttgtggaggaaatcttcaatccagatattggtatgttcacatacgatgaatctacaaaattgttttggtttaatccatcttcttttgaaactgagggtcagtttactctgattggcatagtactgggtctggctatttacaataactgtatactggatgtacattttcccatggttgtctacaggaagctaatggggaaaaaaggaacttttcgtgacttgggagactctcacccagttctatatcagagtttaaaagatttattggagtatgaagggaatgtggaagatgacatgatgatcactttccagatatcacagacagatctttttggtaacccaatgatgtatgatctaaaggaaaatggtgataaaattccaattacaaatgaaaacaggaaggaatttgtcaatctttattctgactacattctcaataaatcagtagaaaaacagttcaaggcttttcggagaggttttcatatggtgaccaatgaatctcccttaaagtacttattcagaccagaagaaattgaattgcttatatgtggaagccggaatctagatttccaagcactagaagaaactacagaatatgacggtggctataccagggactctgttctgattagggagttctgggaaatcgttcattcatttacagatgaacagaaaagactcttcttgcagtttacaacgggcacagacagagcacctgtgggaggactaggaaaattaaagatgattatagccaaaaatggcccagacacagaaaggttacctacatctcatacttgctttaatgtgcttttacttccggaatactcaagcaaagaaaaacttaaagagagattgttgaaggccatcacgtatgccaaaggatttggcatgctgtaa

SEQ ID NO: 1550 - DNA, 1476 bp, synthetic construct
  source 1..1476: mol_type = other DNA; note = NLS-VL12.3-(GS)3-E6AP nucleic acid
ccggcggcgaaacgcgtgaaactggatggcagcggcagcggcagcggcagccaacctgtgctgacacagagccccagcgtgtccgccgctcctcggcagcgggtgaccatcagcgtgtccggctctaatagcaacatcggctccaacaccgtgaactggatccagcagctgcctggaagagcccccgagctgctgatgtacgacgacgacctgctcgccccaggcgtgtctgatagattcagcggctctagaagcggcaccagcgccagcctgaccatcagcggactgcagtctgaagatgaggccgactactacgccgctacatgggacgatagcctgaacggctgggtgttcggcggcggaacaaaggtgaccgtcctgagcggcggcagcggcagcggcagcaatccatatttgagactcaaagttagacgtgaccatatcatagatgatgcacttgtccggctagagatgatcgctatggaaaatcctgcagacttgaagaagcagttgtatgtggaatttgaaggagaacaaggagttgatgagggaggtgtttccaaagaattttttcagctggttgtggaggaaatcttcaatccagatattggtatgttcacatacgatgaatctacaaaattgttttggtttaatccatcttcttttgaaactgagggtcagtttactctgattggcatagtactgggtctggctatttacaataactgtatactggatgtacattttcccatggttgtctacaggaagctaatggggaaaaaaggaacttttcgtgacttgggagactctcacccagttctatatcagagtttaaaagatttattggagtatgaagggaatgtggaagatgacatgatgatcactttccagatatcacagacagatctttttggtaacccaatgatgtatgatctaaaggaaaatggtgataaaattccaattacaaatgaaaacaggaaggaatttgtcaatctttattctgactacattctcaataaatcagtagaaaaacagttcaaggcttttcggagaggttttcatatggtgaccaatgaatctcccttaaagtacttattcagaccagaagaaattgaattgcttatatgtggaagccggaatctagatttccaagcactagaagaaactacagaatatgacggtggctataccagggactctgttctgattagggagttctgggaaatcgttcattcatttacagatgaacagaaaagactcttcttgcagtttacaacgggcacagacagagcacctgtgggaggactaggaaaattaaagatgattatagccaaaaatggcccagacacagaaaggttacctacatctcatacttgctttaatgtgcttttacttccggaatactcaagcaaagaaaaacttaaagagagattgttgaaggccatcacgtatgccaaaggatttggcatgctgtaa

SEQ ID NO: 1551 - DNA, 1482 bp, synthetic construct
  source 1..1482: mol_type = other DNA; note = NLS-VL12.3-(GS)4-E6AP nucleic acid
ccggcggcgaaacgcgtgaaactggatggcagcggcagcggcagcggcagccaacctgtgctgacacagagccccagcgtgtccgccgctcctcggcagcgggtgaccatcagcgtgtccggctctaatagcaacatcggctccaacaccgtgaactggatccagcagctgcctggaagagcccccgagctgctgatgtacgacgacgacctgctcgccccaggcgtgtctgatagattcagcggctctagaagcggcaccagcgccagcctgaccatcagcggactgcagtctgaagatgaggccgactactacgccgctacatgggacgatagcctgaacggctgggtgttcggcggcggaacaaaggtgaccgtcctgagcggcggcagcggcagcggcagcggcagcaatccatatttgagactcaaagttagacgtgaccatatcatagatgatgcacttgtccggctagagatgatcgctatggaaaatcctgcagacttgaagaagcagttgtatgtggaatttgaaggagaacaaggagttgatgagggaggtgtttccaaagaattttttcagctggttgtggaggaaatcttcaatccagatattggtatgttcacatacgatgaatctacaaaattgttttggtttaatccatcttcttttgaaactgagggtcagtttactctgattggcatagtactgggtctggctatttacaataactgtatactggatgtacattttcccatggttgtctacaggaagctaatggggaaaaaaggaacttttcgtgacttgggagactctcacccagttctatatcagagtttaaaagatttattggagtatgaagggaatgtggaagatgacatgatgatcactttccagatatcacagacagatctttttggtaacccaatgatgtatgatctaaaggaaaatggtgataaaattccaattacaaatgaaaacaggaaggaatttgtcaatctttattctgactacattctcaataaatcagtagaaaaacagttcaaggcttttcggagaggttttcatatggtgaccaatgaatctcccttaaagtacttattcagaccagaagaaattgaattgcttatatgtggaagccggaatctagatttccaagcactagaagaaactacagaatatgacggtggctataccagggactctgttctgattagggagttctgggaaatcgttcattcatttacagatgaacagaaaagactcttcttgcagtttacaacgggcacagacagagcacctgtgggaggactaggaaaattaaagatgattatagccaaaaatggcccagacacagaaaggttacctacatctcatacttgctttaatgtgcttttacttccggaatactcaagcaaagaaaaacttaaagagagattgttgaaggccatcacgtatgccaaaggatttggcatgctgtaa

SEQ ID NO: 1552 - DNA, 1488 bp, synthetic construct
  source 1..1488: mol_type = other DNA; note = NLS-VL12.3-(GS)5-E6AP nucleic acid
ccggcggcgaaacgcgtgaaactggatggcagcggcagcggcagcggcagccaacctgtgctgacacagagccccagcgtgtccgccgctcctcggcagcgggtgaccatcagcgtgtccggctctaatagcaacatcggctccaacaccgtgaactggatccagcagctgcctggaagagcccccgagctgctgatgtacgacgacgacctgctcgccccaggcgtgtctgatagattcagcggctctagaagcggcaccagcgccagcctgaccatcagcggactgcagtctgaagatgaggccgactactacgccgctacatgggacgatagcctgaacggctgggtgttcggcggcggaacaaaggtgaccgtcctgagcggcggcagcggcagcggcagcggcagcggcagcaatccatatttgagactcaaagttagacgtgaccatatcatagatgatgcacttgtccggctagagatgatcgctatggaaaatcctgcagacttgaagaagcagttgtatgtggaatttgaaggagaacaaggagttgatgagggaggtgtttccaaagaattttttcagctggttgtggaggaaatcttcaatccagatattggtatgttcacatacgatgaatctacaaaattgttttggtttaatccatcttcttttgaaactgagggtcagtttactctgattggcatagtactgggtctggctatttacaataactgtatactggatgtacattttcccatggttgtctacaggaagctaatggggaaaaaaggaacttttcgtgacttgggagactctcacccagttctatatcagagtttaaaagatttattggagtatgaagggaatgtggaagatgacatgatgatcactttccagatatcacagacagatctttttggtaacccaatgatgtatgatctaaaggaaaatggtgataaaattccaattacaaatgaaaacaggaaggaatttgtcaatctttattctgactacattctcaataaatcagtagaaaaacagttcaaggcttttcggagaggttttcatatggtgaccaatgaatctcccttaaagtacttattcagaccagaagaaattgaattgcttatatgtggaagccggaatctagatttccaagcactagaagaaactacagaatatgacggtggctataccagggactctgttctgattagggagttctgggaaatcgttcattcatttacagatgaacagaaaagactcttcttgcagtttacaacgggcacagacagagcacctgtgggaggactaggaaaattaaagatgattatagccaaaaatggcccagacacagaaaggttacctacatctcatacttgctttaatgtgcttttacttccggaatactcaagcaaagaaaaacttaaagagagattgttgaaggccatcacgtatgccaaaggatttggcatgctgtaa

SEQ ID NO: 1553 - DNA, 1494 bp, synthetic construct
  source 1..1494: mol_type = other DNA; note = NLS-VL12.3-(GS)6-E6AP nucleic acid
ccggcggcgaaacgcgtgaaactggatggcagcggcagcggcagcggcagccaacctgtgctgacacagagccccagcgtgtccgccgctcctcggcagcgggtgaccatcagcgtgtccggctctaatagcaacatcggctccaacaccgtgaactggatccagcagctgcctggaagagcccccgagctgctgatgtacgacgacgacctgctcgccccaggcgtgtctgatagattcagcggctctagaagcggcaccagcgccagcctgaccatcagcggactgcagtctgaagatgaggccgactactacgccgctacatgggacgatagcctgaacggctgggtgttcggcggcggaacaaaggtgaccgtcctgagcggcggcagcggcagcggcagcggcagcggcagcggcagcaatccatatttgagactcaaagttagacgtgaccatatcatagatgatgcacttgtccggctagagatgatcgctatggaaaatcctgcagacttgaagaagcagttgtatgtggaatttgaaggagaacaaggagttgatgagggaggtgtttccaaagaattttttcagctggttgtggaggaaatcttcaatccagatattggtatgttcacatacgatgaatctacaaaattgttttggtttaatccatcttcttttgaaactgagggtcagtttactctgattggcatagtactgggtctggctatttacaataactgtatactggatgtacattttcccatggttgtctacaggaagctaatggggaaaaaaggaacttttcgtgacttgggagactctcacccagttctatatcagagtttaaaagatttattggagtatgaagggaatgtggaagatgacatgatgatcactttccagatatcacagacagatctttttggtaacccaatgatgtatgatctaaaggaaaatggtgataaaattccaattacaaatgaaaacaggaaggaatttgtcaatctttattctgactacattctcaataaatcagtagaaaaacagttcaaggcttttcggagaggttttcatatggtgaccaatgaatctcccttaaagtacttattcagaccagaagaaattgaattgcttatatgtggaagccggaatctagatttccaagcactagaagaaactacagaatatgacggtggctataccagggactctgttctgattagggagttctgggaaatcgttcattcatttacagatgaacagaaaagactcttcttgcagtttacaacgggcacagacagagcacctgtgggaggactaggaaaattaaagatgattatagccaaaaatggcccagacacagaaaggttacctacatctcatacttgctttaatgtgcttttacttccggaatactcaagcaaagaaaaacttaaagagagattgttgaaggccatcacgtatgccaaaggatttggcatgctgtaa

SEQ ID NO: 1554 - DNA, 1494 bp, synthetic construct
  source 1..1494: mol_type = other DNA; note = HA-NLS-VL12.3-(GS)1-E6AP nucleic acid
atgtacccatacgatgttccagattacgctccggcggcgaaacgcgtgaaactggatggcagcggcagcggcagcggcagccaacctgtgctgacacagagccccagcgtgtccgccgctcctcggcagcgggtgaccatcagcgtgtccggctctaatagcaacatcggctccaacaccgtgaactggatccagcagctgcctggaagagcccccgagctgctgatgtacgacgacgacctgctcgccccaggcgtgtctgatagattcagcggctctagaagcggcaccagcgccagcctgaccatcagcggactgcagtctgaagatgaggccgactactacgccgctacatgggacgatagcctgaacggctgggtgttcggcggcggaacaaaggtgaccgtcctgagcggcggcagcaatccatatttgagactcaaagttagacgtgaccatatcatagatgatgcacttgtccggctagagatgatcgctatggaaaatcctgcagacttgaagaagcagttgtatgtggaatttgaaggagaacaaggagttgatgagggaggtgtttccaaagaattttttcagctggttgtggaggaaatcttcaatccagatattggtatgttcacatacgatgaatctacaaaattgttttggtttaatccatcttcttttgaaactgagggtcagtttactctgattggcatagtactgggtctggctatttacaataactgtatactggatgtacattttcccatggttgtctacaggaagctaatggggaaaaaaggaacttttcgtgacttgggagactctcacccagttctatatcagagtttaaaagatttattggagtatgaagggaatgtggaagatgacatgatgatcactttccagatatcacagacagatctttttggtaacccaatgatgtatgatctaaaggaaaatggtgataaaattccaattacaaatgaaaacaggaaggaatttgtcaatctttattctgactacattctcaataaatcagtagaaaaacagttcaaggcttttcggagaggttttcatatggtgaccaatgaatctcccttaaagtacttattcagaccagaagaaattgaattgcttatatgtggaagccggaatctagatttccaagcactagaagaaactacagaatatgacggtggctataccagggactctgttctgattagggagttctgggaaatcgttcattcatttacagatgaacagaaaagactcttcttgcagtttacaacgggcacagacagagcacctgtgggaggactaggaaaattaaagatgattatagccaaaaatggcccagacacagaaaggttacctacatctcatacttgctttaatgtgcttttacttccggaatactcaagcaaagaaaaacttaaagagagattgttgaaggccatcacgtatgccaaaggatttggcatgctgtaa

SEQ ID NO: 1555 - DNA, 1500 bp, synthetic construct
  source 1..1500: mol_type = other DNA; note = HA-NLS-VL12.3-(GS)2-E6AP nucleic acid
atgtacccatacgatgttccagattacgctccggcggcgaaacgcgtgaaactggatggcagcggcagcggcagcggcagccaacctgtgctgacacagagccccagcgtgtccgccgctcctcggcagcgggtgaccatcagcgtgtccggctctaatagcaacatcggctccaacaccgtgaactggatccagcagctgcctggaagagcccccgagctgctgatgtacgacgacgacctgctcgccccaggcgtgtctgatagattcagcggctctagaagcggcaccagcgccagcctgaccatcagcggactgcagtctgaagatgaggccgactactacgccgctacatgggacgatagcctgaacggctgggtgttcggcggcggaacaaaggtgaccgtcctgagcggcggcagcggcagcaatccatatttgagactcaaagttagacgtgaccatatcatagatgatgcacttgtccggctagagatgatcgctatggaaaatcctgcagacttgaagaagcagttgtatgtggaatttgaaggagaacaaggagttgatgagggaggtgtttccaaagaattttttcagctggttgtggaggaaatcttcaatccagatattggtatgttcacatacgatgaatctacaaaattgttttggtttaatccatcttcttttgaaactgagggtcagtttactctgattggcatagtactgggtctggctatttacaataactgtatactggatgtacattttcccatggttgtctacaggaagctaatggggaaaaaaggaacttttcgtgacttgggagactctcacccagttctatatcagagtttaaaagatttattggagtatgaagggaatgtggaagatgacatgatgatcactttccagatatcacagacagatctttttggtaacccaatgatgtatgatctaaaggaaaatggtgataaaattccaattacaaatgaaaacaggaaggaatttgtcaatctttattctgactacattctcaataaatcagtagaaaaacagttcaaggcttttcggagaggttttcatatggtgaccaatgaatctcccttaaagtacttattcagaccagaagaaattgaattgcttatatgtggaagccggaatctagatttccaagcactagaagaaactacagaatatgacggtggctataccagggactctgttctgattagggagttctgggaaatcgttcattcatttacagatgaacagaaaagactcttcttgcagtttacaacgggcacagacagagcacctgtgggaggactaggaaaattaaagatgattatagccaaaaatggcccagacacagaaaggttacctacatctcatacttgctttaatgtgcttttacttccggaatactcaagcaaagaaaaacttaaagagagattgttgaaggccatcacgtatgccaaaggatttggcatgctgtaa

SEQ ID NO: 1556 - DNA, 1506 bp, synthetic construct
  source 1..1506: mol_type = other DNA; note = HA-NLS-VL12.3-(GS)3-E6AP nucleic acid
atgtacccatacgatgttccagattacgctccggcggcgaaacgcgtgaaactggatggcagcggcagcggcagcggcagccaacctgtgctgacacagagccccagcgtgtccgccgctcctcggcagcgggtgaccatcagcgtgtccggctctaatagcaacatcggctccaacaccgtgaactggatccagcagctgcctggaagagcccccgagctgctgatgtacgacgacgacctgctcgccccaggcgtgtctgatagattcagcggctctagaagcggcaccagcgccagcctgaccatcagcggactgcagtctgaagatgaggccgactactacgccgctacatgggacgatagcctgaacggctgggtgttcggcggcggaacaaaggtgaccgtcctgagcggcggcagcggcagcggcagcaatccatatttgagactcaaagttagacgtgaccatatcatagatgatgcacttgtccggctagagatgatcgctatggaaaatcctgcagacttgaagaagcagttgtatgtggaatttgaaggagaacaaggagttgatgagggaggtgtttccaaagaattttttcagctggttgtggaggaaatcttcaatccagatattggtatgttcacatacgatgaatctacaaaattgttttggtttaatccatcttcttttgaaactgagggtcagtttactctgattggcatagtactgggtctggctatttacaataactgtatactggatgtacattttcccatggttgtctacaggaagctaatggggaaaaaaggaacttttcgtgacttgggagactctcacccagttctatatcagagtttaaaagatttattggagtatgaagggaatgtggaagatgacatgatgatcactttccagatatcacagacagatctttttggtaacccaatgatgtatgatctaaaggaaaatggtgataaaattccaattacaaatgaaaacaggaaggaatttgtcaatctttattctgactacattctcaataaatcagtagaaaaacagttcaaggcttttcggagaggttttcatatggtgaccaatgaatctcccttaaagtacttattcagaccagaagaaattgaattgcttatatgtggaagccggaatctagatttccaagcactagaagaaactacagaatatgacggtggctataccagggactctgttctgattagggagttctgggaaatcgttcattcatttacagatgaacagaaaagactcttcttgcagtttacaacgggcacagacagagcacctgtgggaggactaggaaaattaaagatgattatagccaaaaatggcccagacacagaaaggttacctacatctcatacttgctttaatgtgcttttacttccggaatactcaagcaaagaaaaacttaaagagagattgttgaaggccatcacgtatgccaaaggatttggcatgctgtaa

SEQ ID NO: 1557 - DNA, 1512 bp, synthetic construct
  source 1..1512: mol_type = other DNA; note = HA-NLS-VL12.3-(GS)4-E6AP nucleic acid
atgtacccatacgatgttccagattacgctccggcggcgaaacgcgtgaaactggatggcagcggcagcggcagcggcagccaacctgtgctgacacagagccccagcgtgtccgccgctcctcggcagcgggtgaccatcagcgtgtccggctctaatagcaacatcggctccaacaccgtgaactggatccagcagctgcctggaagagcccccgagctgctgatgtacgacgacgacctgctcgccccaggcgtgtctgatagattcagcggctctagaagcggcaccagcgccagcctgaccatcagcggactgcagtctgaagatgaggccgactactacgccgctacatgggacgatagcctgaacggctgggtgttcggcggcggaacaaaggtgaccgtcctgagcggcggcagcggcagcggcagcggcagcaatccatatttgagactcaaagttagacgtgaccatatcatagatgatgcacttgtccggctagagatgatcgctatggaaaatcctgcagacttgaagaagcagttgtatgtggaatttgaaggagaacaaggagttgatgagggaggtgtttccaaagaattttttcagctggttgtggaggaaatcttcaatccagatattggtatgttcacatacgatgaatctacaaaattgttttggtttaatccatcttcttttgaaactgagggtcagtttactctgattggcatagtactgggtctggctatttacaataactgtatactggatgtacattttcccatggttgtctacaggaagctaatggggaaaaaaggaacttttcgtgacttgggagactctcacccagttctatatcagagtttaaaagatttattggagtatgaagggaatgtggaagatgacatgatgatcactttccagatatcacagacagatctttttggtaacccaatgatgtatgatctaaaggaaaatggtgataaaattccaattacaaatgaaaacaggaaggaatttgtcaatctttattctgactacattctcaataaatcagtagaaaaacagttcaaggcttttcggagaggttttcatatggtgaccaatgaatctcccttaaagtacttattcagaccagaagaaattgaattgcttatatgtggaagccggaatctagatttccaagcactagaagaaactacagaatatgacggtggctataccagggactctgttctgattagggagttctgggaaatcgttcattcatttacagatgaacagaaaagactcttcttgcagtttacaacgggcacagacagagcacctgtgggaggactaggaaaattaaagatgattatagccaaaaatggcccagacacagaaaggttacctacatctcatacttgctttaatgtgcttttacttccggaatactcaagcaaagaaaaacttaaagagagattgttgaaggccatcacgtatgccaaaggatttggcatgctgtaa

SEQ ID NO: 1558 - DNA, 1518 bp, synthetic construct
  source 1..1518: mol_type = other DNA; note = HA-NLS-VL12.3-(GS)5-E6AP nucleic acid
atgtacccatacgatgttccagattacgctccggcggcgaaacgcgtgaaactggatggcagcggcagcggcagcggcagccaacctgtgctgacacagagccccagcgtgtccgccgctcctcggcagcgggtgaccatcagcgtgtccggctctaatagcaacatcggctccaacaccgtgaactggatccagcagctgcctggaagagcccccgagctgctgatgtacgacgacgacctgctcgccccaggcgtgtctgatagattcagcggctctagaagcggcaccagcgccagcctgaccatcagcggactgcagtctgaagatgaggccgactactacgccgctacatgggacgatagcctgaacggctgggtgttcggcggcggaacaaaggtgaccgtcctgagcggcggcagcggcagcggcagcggcagcggcagcaatccatatttgagactcaaagttagacgtgaccatatcatagatgatgcacttgtccggctagagatgatcgctatggaaaatcctgcagacttgaagaagcagttgtatgtggaatttgaaggagaacaaggagttgatgagggaggtgtttccaaagaattttttcagctggttgtggaggaaatcttcaatccagatattggtatgttcacatacgatgaatctacaaaattgttttggtttaatccatcttcttttgaaactgagggtcagtttactctgattggcatagtactgggtctggctatttacaataactgtatactggatgtacattttcccatggttgtctacaggaagctaatggggaaaaaaggaacttttcgtgacttgggagactctcacccagttctatatcagagtttaaaagatttattggagtatgaagggaatgtggaagatgacatgatgatcactttccagatatcacagacagatctttttggtaacccaatgatgtatgatctaaaggaaaatggtgataaaattccaattacaaatgaaaacaggaaggaatttgtcaatctttattctgactacattctcaataaatcagtagaaaaacagttcaaggcttttcggagaggttttcatatggtgaccaatgaatctcccttaaagtacttattcagaccagaagaaattgaattgcttatatgtggaagccggaatctagatttccaagcactagaagaaactacagaatatgacggtggctataccagggactctgttctgattagggagttctgggaaatcgttcattcatttacagatgaacagaaaagactcttcttgcagtttacaacgggcacagacagagcacctgtgggaggactaggaaaattaaagatgattatagccaaaaatggcccagacacagaaaggttacctacatctcatacttgctttaatgtgcttttacttccggaatactcaagcaaagaaaaacttaaagagagattgttgaaggccatcacgtatgccaaaggatttggcatgctgtaa

SEQ ID NO: 1559 - DNA, 1524 bp, synthetic construct
  source 1..1524: mol_type = other DNA; note = HA-NLS-VL12.3-(GS)6-E6AP nucleic acid
atgtacccatacgatgttccagattacgctccggcggcgaaacgcgtgaaactggatggcagcggcagcggcagcggcagccaacctgtgctgacacagagccccagcgtgtccgccgctcctcggcagcgggtgaccatcagcgtgtccggctctaatagcaacatcggctccaacaccgtgaactggatccagcagctgcctggaagagcccccgagctgctgatgtacgacgacgacctgctcgccccaggcgtgtctgatagattcagcggctctagaagcggcaccagcgccagcctgaccatcagcggactgcagtctgaagatgaggccgactactacgccgctacatgggacgatagcctgaacggctgggtgttcggcggcggaacaaaggtgaccgtcctgagcggcggcagcggcagcggcagcggcagcggcagcggcagcaatccatatttgagactcaaagttagacgtgaccatatcatagatgatgcacttgtccggctagagatgatcgctatggaaaatcctgcagacttgaagaagcagttgtatgtggaatttgaaggagaacaaggagttgatgagggaggtgtttccaaagaattttttcagctggttgtggaggaaatcttcaatccagatattggtatgttcacatacgatgaatctacaaaattgttttggtttaatccatcttcttttgaaactgagggtcagtttactctgattggcatagtactgggtctggctatttacaataactgtatactggatgtacattttcccatggttgtctacaggaagctaatggggaaaaaaggaacttttcgtgacttgggagactctcacccagttctatatcagagtttaaaagatttattggagtatgaagggaatgtggaagatgacatgatgatcactttccagatatcacagacagatctttttggtaacccaatgatgtatgatctaaaggaaaatggtgataaaattccaattacaaatgaaaacaggaaggaatttgtcaatctttattctgactacattctcaataaatcagtagaaaaacagttcaaggcttttcggagaggttttcatatggtgaccaatgaatctcccttaaagtacttattcagaccagaagaaattgaattgcttatatgtggaagccggaatctagatttccaagcactagaagaaactacagaatatgacggtggctataccagggactctgttctgattagggagttctgggaaatcgttcattcatttacagatgaacagaaaagactcttcttgcagtttacaacgggcacagacagagcacctgtgggaggactaggaaaattaaagatgattatagccaaaaatggcccagacacagaaaggttacctacatctcatacttgctttaatgtgcttttacttccggaatactcaagcaaagaaaaacttaaagagagattgttgaaggccatcacgtatgccaaaggatttggcatgctgtaa

SEQ ID NO: 1560 - DNA, 1452 bp, synthetic construct
  source 1..1452: mol_type = other DNA; note = FBXW7a-(GS)1-VL12.3 nucleic acid
aatcaggaactgctctctgtgggcagcaaaagacgacgaactggaggctctctgagaggtaacccttcctcaagccaggtagatgaagaacagatgaatcgtgtggtagaggaggaacagcaacagcaactcagacaacaagaggaggagcacactgcaaggaatggtgaagttgttggagtagaacctagacctggaggccaaaatgattcccagcaaggacagttggaagaaaacaataatagatttatttcggtagatgaggactcctcaggaaaccaagaagaacaagaggaagatgaagaacatgctggtgaacaagatgaggaggatgaggaggaggaggagatggaccaggagagtgacgattttgatcagtctgatgatagtagcagagaagatgaacatacacatactaacagtgtcacgaactccagtagtattgtggacctgcccgttcaccaactctcctccccattctatacaaaaacaacaaaaatgaaaagaaagttggaccatggttctgaggtccgctctttttctttgggaaagaaaccatgcaaagtctcagaatatacaagtaccactgggcttgtaccatgttcagcaacaccaacaacttttggggacctcagagcagccaatggccaagggcaacaacgacgccgaattacatctgtccagccacctacaggcctccaggaatggctaaaaatgtttcagagctggagtggaccagagaaattgcttgctttagatgaactcattgatagttgtgaaccaacacaagtaaaacatatgatgcaagtgatagaaccccagtttcaacgagacttcatttcattgctccctaaagagttggcactctatgtgctttcattcctggaacccaaagacctgctacaagcagctcagacatgtcgctactggagaattttggctgaagacaaccttctctggagagagaaatgcaaagaagaggggattgatgaaccattgcacatcaagagaagaaaagtaataaaaccaggtttcatacacagtccatggaaaagtgcatacatcagacagcacagaattgatactaactcgaggcgaggaggcagcggcagccaacctgtgctgacacagagccccagcgtgtccgccgctcctcggcagcgggtgaccatcagcgtgtccggctctaatagcaacatcggctccaacaccgtgaactggatccagcagctgcctggaagagcccccgagctgctgatgtacgacgacgacctgctcgccccaggcgtgtctgatagattcagcggctctagaagcggcaccagcgccagcctgaccatcagcggactgcagtctgaagatgaggccgactactacgccgctacatgggacgatagcctgaacggctgggtgttcggcggcggaacaaaggtgaccgtcctgagcggctaa

SEQ ID NO: 1561 - DNA, 1458 bp, synthetic construct
  source 1..1458: mol_type = other DNA; note = FBXW7a-(GS)2-VL12.3 nucleic acid
aatcaggaactgctctctgtgggcagcaaaagacgacgaactggaggctctctgagaggtaacccttcctcaagccaggtagatgaagaacagatgaatcgtgtggtagaggaggaacagcaacagcaactcagacaacaagaggaggagcacactgcaaggaatggtgaagttgttggagtagaacctagacctggaggccaaaatgattcccagcaaggacagttggaagaaaacaataatagatttatttcggtagatgaggactcctcaggaaaccaagaagaacaagaggaagatgaagaacatgctggtgaacaagatgaggaggatgaggaggaggaggagatggaccaggagagtgacgattttgatcagtctgatgatagtagcagagaagatgaacatacacatactaacagtgtcacgaactccagtagtattgtggacctgcccgttcaccaactctcctccccattctatacaaaaacaacaaaaatgaaaagaaagttggaccatggttctgaggtccgctctttttctttgggaaagaaaccatgcaaagtctcagaatatacaagtaccactgggcttgtaccatgttcagcaacaccaacaacttttggggacctcagagcagccaatggccaagggcaacaacgacgccgaattacatctgtccagccacctacaggcctccaggaatggctaaaaatgtttcagagctggagtggaccagagaaattgcttgctttagatgaactcattgatagttgtgaaccaacacaagtaaaacatatgatgcaagtgatagaaccccagtttcaacgagacttcatttcattgctccctaaagagttggcactctatgtgctttcattcctggaacccaaagacctgctacaagcagctcagacatgtcgctactggagaattttggctgaagacaaccttctctggagagagaaatgcaaagaagaggggattgatgaaccattgcacatcaagagaagaaaagtaataaaaccaggtttcatacacagtccatggaaaagtgcatacatcagacagcacagaattgatactaactcgaggcgaggaggcagcggcagcggcagccaacctgtgctgacacagagccccagcgtgtccgccgctcctcggcagcgggtgaccatcagcgtgtccggctctaatagcaacatcggctccaacaccgtgaactggatccagcagctgcctggaagagcccccgagctgctgatgtacgacgacgacctgctcgccccaggcgtgtctgatagattcagcggctctagaagcggcaccagcgccagcctgaccatcagcggactgcagtctgaagatgaggccgactactacgccgctacatgggacgatagcctgaacggctgggtgttcggcggcggaacaaaggtgaccgtcctgagcggctaa

SEQ ID NO: 1562 - DNA, 1464 bp, synthetic construct
  source 1..1464: mol_type = other DNA; note = FBXW7a-(GS)3-VL12.3 nucleic acid
aatcaggaactgctctctgtgggcagcaaaagacgacgaactggaggctctctgagaggtaacccttcctcaagccaggtagatgaagaacagatgaatcgtgtggtagaggaggaacagcaacagcaactcagacaacaagaggaggagcacactgcaaggaatggtgaagttgttggagtagaacctagacctggaggccaaaatgattcccagcaaggacagttggaagaaaacaataatagatttatttcggtagatgaggactcctcaggaaaccaagaagaacaagaggaagatgaagaacatgctggtgaacaagatgaggaggatgaggaggaggaggagatggaccaggagagtgacgattttgatcagtctgatgatagtagcagagaagatgaacatacacatactaacagtgtcacgaactccagtagtattgtggacctgcccgttcaccaactctcctccccattctatacaaaaacaacaaaaatgaaaagaaagttggaccatggttctgaggtccgctctttttctttgggaaagaaaccatgcaaagtctcagaatatacaagtaccactgggcttgtaccatgttcagcaacaccaacaacttttggggacctcagagcagccaatggccaagggcaacaacgacgccgaattacatctgtccagccacctacaggcctccaggaatggctaaaaatgtttcagagctggagtggaccagagaaattgcttgctttagatgaactcattgatagttgtgaaccaacacaagtaaaacatatgatgcaagtgatagaaccccagtttcaacgagacttcatttcattgctccctaaagagttggcactctatgtgctttcattcctggaacccaaagacctgctacaagcagctcagacatgtcgctactggagaattttggctgaagacaaccttctctggagagagaaatgcaaagaagaggggattgatgaaccattgcacatcaagagaagaaaagtaataaaaccaggtttcatacacagtccatggaaaagtgcatacatcagacagcacagaattgatactaactcgaggcgaggaggcagcggcagcggcagcggcagccaacctgtgctgacacagagccccagcgtgtccgccgctcctcggcagcgggtgaccatcagcgtgtccggctctaatagcaacatcggctccaacaccgtgaactggatccagcagctgcctggaagagcccccgagctgctgatgtacgacgacgacctgctcgccccaggcgtgtctgatagattcagcggctctagaagcggcaccagcgccagcctgaccatcagcggactgcagtctgaagatgaggccgactactacgccgctacatgggacgatagcctgaacggctgggtgttcggcggcggaacaaaggtgaccgtcctgagcggctaa

SEQ ID NO: 1563 - DNA, 1470 bp, synthetic construct
  source 1..1470: mol_type = other DNA; note = FBXW7a-(GS)4-VL12.3 nucleic acid
aatcaggaactgctctctgtgggcagcaaaagacgacgaactggaggctctctgagaggtaacccttcctcaagccaggtagatgaagaacagatgaatcgtgtggtagaggaggaacagcaacagcaactcagacaacaagaggaggagcacactgcaaggaatggtgaagttgttggagtagaacctagacctggaggccaaaatgattcccagcaaggacagttggaagaaaacaataatagatttatttcggtagatgaggactcctcaggaaaccaagaagaacaagaggaagatgaagaacatgctggtgaacaagatgaggaggatgaggaggaggaggagatggaccaggagagtgacgattttgatcagtctgatgatagtagcagagaagatgaacatacacatactaacagtgtcacgaactccagtagtattgtggacctgcccgttcaccaactctcctccccattctatacaaaaacaacaaaaatgaaaagaaagttggaccatggttctgaggtccgctctttttctttgggaaagaaaccatgcaaagtctcagaatatacaagtaccactgggcttgtaccatgttcagcaacaccaacaacttttggggacctcagagcagccaatggccaagggcaacaacgacgccgaattacatctgtccagccacctacaggcctccaggaatggctaaaaatgtttcagagctggagtggaccagagaaattgcttgctttagatgaactcattgatagttgtgaaccaacacaagtaaaacatatgatgcaagtgatagaaccccagtttcaacgagacttcatttcattgctccctaaagagttggcactctatgtgctttcattcctggaacccaaagacctgctacaagcagctcagacatgtcgctactggagaattttggctgaagacaaccttctctggagagagaaatgcaaagaagaggggattgatgaaccattgcacatcaagagaagaaaagtaataaaaccaggtttcatacacagtccatggaaaagtgcatacatcagacagcacagaattgatactaactcgaggcgaggaggcagcggcagcggcagcggcagcggcagccaacctgtgctgacacagagccccagcgtgtccgccgctcctcggcagcgggtgaccatcagcgtgtccggctctaatagcaacatcggctccaacaccgtgaactggatccagcagctgcctggaagagcccccgagctgctgatgtacgacgacgacctgctcgccccaggcgtgtctgatagattcagcggctctagaagcggcaccagcgccagcctgaccatcagcggactgcagtctgaagatgaggccgactactacgccgctacatgggacgatagcctgaacggctgggtgttcggcggcggaacaaaggtgaccgtcctgagcggctaa

SEQ ID NO: 1564 - DNA, 1476 bp, synthetic construct
  source 1..1476: mol_type = other DNA; note = FBXW7a-(GS)5-VL12.3 nucleic acid
aatcaggaactgctctctgtgggcagcaaaagacgacgaactggaggctctctgagaggtaacccttcctcaagccaggtagatgaagaacagatgaatcgtgtggtagaggaggaacagcaacagcaactcagacaacaagaggaggagcacactgcaaggaatggtgaagttgttggagtagaacctagacctggaggccaaaatgattcccagcaaggacagttggaagaaaacaataatagatttatttcggtagatgaggactcctcaggaaaccaagaagaacaagaggaagatgaagaacatgctggtgaacaagatgaggaggatgaggaggaggaggagatggaccaggagagtgacgattttgatcagtctgatgatagtagcagagaagatgaacatacacatactaacagtgtcacgaactccagtagtattgtggacctgcccgttcaccaactctcctccccattctatacaaaaacaacaaaaatgaaaagaaagttggaccatggttctgaggtccgctctttttctttgggaaagaaaccatgcaaagtctcagaatatacaagtaccactgggcttgtaccatgttcagcaacaccaacaacttttggggacctcagagcagccaatggccaagggcaacaacgacgccgaattacatctgtccagccacctacaggcctccaggaatggctaaaaatgtttcagagctggagtggaccagagaaattgcttgctttagatgaactcattgatagttgtgaaccaacacaagtaaaacatatgatgcaagtgatagaaccccagtttcaacgagacttcatttcattgctccctaaagagttggcactctatgtgctttcattcctggaacccaaagacctgctacaagcagctcagacatgtcgctactggagaattttggctgaagacaaccttctctggagagagaaatgcaaagaagaggggattgatgaaccattgcacatcaagagaagaaaagtaataaaaccaggtttcatacacagtccatggaaaagtgcatacatcagacagcacagaattgatactaactcgaggcgaggaggcagcggcagcggcagcggcagcggcagcggcagccaacctgtgctgacacagagccccagcgtgtccgccgctcctcggcagcgggtgaccatcagcgtgtccggctctaatagcaacatcggctccaacaccgtgaactggatccagcagctgcctggaagagcccccgagctgctgatgtacgacgacgacctgctcgccccaggcgtgtctgatagattcagcggctctagaagcggcaccagcgccagcctgaccatcagcggactgcagtctgaagatgaggccgactactacgccgctacatgggacgatagcctgaacggctgggtgttcggcggcggaacaaaggtgaccgtcctgagcggctaa

SEQ ID NO: 1565 - DNA, 1482 bp, synthetic construct
  source 1..1482: mol_type = other DNA; note = FBXW7a-(GS)6-VL12.3 nucleic acid
aatcaggaactgctctctgtgggcagcaaaagacgacgaactggaggctctctgagaggtaacccttcctcaagccaggtagatgaagaacagatgaatcgtgtggtagaggaggaacagcaacagcaactcagacaacaagaggaggagcacactgcaaggaatggtgaagttgttggagtagaacctagacctggaggccaaaatgattcccagcaaggacagttggaagaaaacaataatagatttatttcggtagatgaggactcctcaggaaaccaagaagaacaagaggaagatgaagaacatgctggtgaacaagatgaggaggatgaggaggaggaggagatggaccaggagagtgacgattttgatcagtctgatgatagtagcagagaagatgaacatacacatactaacagtgtcacgaactccagtagtattgtggacctgcccgttcaccaactctcctccccattctatacaaaaacaacaaaaatgaaaagaaagttggaccatggttctgaggtccgctctttttctttgggaaagaaaccatgcaaagtctcagaatatacaagtaccactgggcttgtaccatgttcagcaacaccaacaacttttggggacctcagagcagccaatggccaagggcaacaacgacgccgaattacatctgtccagccacctacaggcctccaggaatggctaaaaatgtttcagagctggagtggaccagagaaattgcttgctttagatgaactcattgatagttgtgaaccaacacaagtaaaacatatgatgcaagtgatagaaccccagtttcaacgagacttcatttcattgctccctaaagagttggcactctatgtgctttcattcctggaacccaaagacctgctacaagcagctcagacatgtcgctactggagaattttggctgaagacaaccttctctggagagagaaatgcaaagaagaggggattgatgaaccattgcacatcaagagaagaaaagtaataaaaccaggtttcatacacagtccatggaaaagtgcatacatcagacagcacagaattgatactaactcgaggcgaggaggcagcggcagcggcagcggcagcggcagcggcagcggcagccaacctgtgctgacacagagccccagcgtgtccgccgctcctcggcagcgggtgaccatcagcgtgtccggctctaatagcaacatcggctccaacaccgtgaactggatccagcagctgcctggaagagcccccgagctgctgatgtacgacgacgacctgctcgccccaggcgtgtctgatagattcagcggctctagaagcggcaccagcgccagcctgaccatcagcggactgcagtctgaagatgaggccgactactacgccgctacatgggacgatagcctgaacggctgggtgttcggcggcggaacaaaggtgaccgtcctgagcggctaa

SEQ ID NO: 1566 - DNA, 1482 bp, synthetic construct
  source 1..1482: mol_type = other DNA; note = HA-FBXW7a-(GS)1-VL12.3 nucleic acid
atgtacccatacgatgttccagattacgctaatcaggaactgctctctgtgggcagcaaaagacgacgaactggaggctctctgagaggtaacccttcctcaagccaggtagatgaagaacagatgaatcgtgtggtagaggaggaacagcaacagcaactcagacaacaagaggaggagcacactgcaaggaatggtgaagttgttggagtagaacctagacctggaggccaaaatgattcccagcaaggacagttggaagaaaacaataatagatttatttcggtagatgaggactcctcaggaaaccaagaagaacaagaggaagatgaagaacatgctggtgaacaagatgaggaggatgaggaggaggaggagatggaccaggagagtgacgattttgatcagtctgatgatagtagcagagaagatgaacatacacatactaacagtgtcacgaactccagtagtattgtggacctgcccgttcaccaactctcctccccattctatacaaaaacaacaaaaatgaaaagaaagttggaccatggttctgaggtccgctctttttctttgggaaagaaaccatgcaaagtctcagaatatacaagtaccactgggcttgtaccatgttcagcaacaccaacaacttttggggacctcagagcagccaatggccaagggcaacaacgacgccgaattacatctgtccagccacctacaggcctccaggaatggctaaaaatgtttcagagctggagtggaccagagaaattgcttgctttagatgaactcattgatagttgtgaaccaacacaagtaaaacatatgatgcaagtgatagaaccccagtttcaacgagacttcatttcattgctccctaaagagttggcactctatgtgctttcattcctggaacccaaagacctgctacaagcagctcagacatgtcgctactggagaattttggctgaagacaaccttctctggagagagaaatgcaaagaagaggggattgatgaaccattgcacatcaagagaagaaaagtaataaaaccaggtttcatacacagtccatggaaaagtgcatacatcagacagcacagaattgatactaactcgaggcgaggaggcagcggcagccaacctgtgctgacacagagccccagcgtgtccgccgctcctcggcagcgggtgaccatcagcgtgtccggctctaatagcaacatcggctccaacaccgtgaactggatccagcagctgcctggaagagcccccgagctgctgatgtacgacgacgacctgctcgccccaggcgtgtctgatagattcagcggctctagaagcggcaccagcgccagcctgaccatcagcggactgcagtctgaagatgaggccgactactacgccgctacatgggacgatagcctgaacggctgggtgttcggcggcggaacaaaggtgaccgtcctgagcggctaa

SEQ ID NO: 1567 - DNA, 1488 bp, synthetic construct
  source 1..1488: mol_type = other DNA; note = HA-FBXW7a-(GS)2-VL12.3 nucleic acid
atgtacccatacgatgttccagattacgctaatcaggaactgctctctgtgggcagcaaaagacgacgaactggaggctctctgagaggtaacccttcctcaagccaggtagatgaagaacagatgaatcgtgtggtagaggaggaacagcaacagcaactcagacaacaagaggaggagcacactgcaaggaatggtgaagttgttggagtagaacctagacctggaggccaaaatgattcccagcaaggacagttggaagaaaacaataatagatttatttcggtagatgaggactcctcaggaaaccaagaagaacaagaggaagatgaagaacatgctggtgaacaagatgaggaggatgaggaggaggaggagatggaccaggagagtgacgattttgatcagtctgatgatagtagcagagaagatgaacatacacatactaacagtgtcacgaactccagtagtattgtggacctgcccgttcaccaactctcctccccattctatacaaaaacaacaaaaatgaaaagaaagttggaccatggttctgaggtccgctctttttctttgggaaagaaaccatgcaaagtctcagaatatacaagtaccactgggcttgtaccatgttcagcaacaccaacaacttttggggacctcagagcagccaatggccaagggcaacaacgacgccgaattacatctgtccagccacctacaggcctccaggaatggctaaaaatgtttcagagctggagtggaccagagaaattgcttgctttagatgaactcattgatagttgtgaaccaacacaagtaaaacatatgatgcaagtgatagaaccccagtttcaacgagacttcatttcattgctccctaaagagttggcactctatgtgctttcattcctggaacccaaagacctgctacaagcagctcagacatgtcgctactggagaattttggctgaagacaaccttctctggagagagaaatgcaaagaagaggggattgatgaaccattgcacatcaagagaagaaaagtaataaaaccaggtttcatacacagtccatggaaaagtgcatacatcagacagcacagaattgatactaactcgaggcgaggaggcagcggcagcggcagccaacctgtgctgacacagagccccagcgtgtccgccgctcctcggcagcgggtgaccatcagcgtgtccggctctaatagcaacatcggctccaacaccgtgaactggatccagcagctgcctggaagagcccccgagctgctgatgtacgacgacgacctgctcgccccaggcgtgtctgatagattcagcggctctagaagcggcaccagcgccagcctgaccatcagcggactgcagtctgaagatgaggccgactactacgccgctacatgggacgatagcctgaacggctgggtgttcggcggcggaacaaaggtgaccgtcctgagcggctaa

SEQ ID NO: 1568 - DNA, 1494 bp, synthetic construct
  source 1..1494: mol_type = other DNA; note = HA-FBXW7a-(GS)3-VL12.3 nucleic acid
atgtacccatacgatgttccagattacgctaatcaggaactgctctctgtgggcagcaaaagacgacgaactggaggctctctgagaggtaacccttcctcaagccaggtagatgaagaacagatgaatcgtgtggtagaggaggaacagcaacagcaactcagacaacaagaggaggagcacactgcaaggaatggtgaagttgttggagtagaacctagacctggaggccaaaatgattcccagcaaggacagttggaagaaaacaataatagatttatttcggtagatgaggactcctcaggaaaccaagaagaacaagaggaagatgaagaacatgctggtgaacaagatgaggaggatgaggaggaggaggagatggaccaggagagtgacgattttgatcagtctgatgatagtagcagagaagatgaacatacacatactaacagtgtcacgaactccagtagtattgtggacctgcccgttcaccaactctcctccccattctatacaaaaacaacaaaaatgaaaagaaagttggaccatggttctgaggtccgctctttttctttgggaaagaaaccatgcaaagtctcagaatatacaagtaccactgggcttgtaccatgttcagcaacaccaacaacttttggggacctcagagcagccaatggccaagggcaacaacgacgccgaattacatctgtccagccacctacaggcctccaggaatggctaaaaatgtttcagagctggagtggaccagagaaattgcttgctttagatgaactcattgatagttgtgaaccaacacaagtaaaacatatgatgcaagtgatagaaccccagtttcaacgagacttcatttcattgctccctaaagagttggcactctatgtgctttcattcctggaacccaaagacctgctacaagcagctcagacatgtcgctactggagaattttggctgaagacaaccttctctggagagagaaatgcaaagaagaggggattgatgaaccattgcacatcaagagaagaaaagtaataaaaccaggtttcatacacagtccatggaaaagtgcatacatcagacagcacagaattgatactaactcgaggcgaggaggcagcggcagcggcagcggcagccaacctgtgctgacacagagccccagcgtgtccgccgctcctcggcagcgggtgaccatcagcgtgtccggctctaatagcaacatcggctccaacaccgtgaactggatccagcagctgcctggaagagcccccgagctgctgatgtacgacgacgacctgctcgccccaggcgtgtctgatagattcagcggctctagaagcggcaccagcgccagcctgaccatcagcggactgcagtctgaagatgaggccgactactacgccgctacatgggacgatagcctgaacggctgggtgttcggcggcggaacaaaggtgaccgtcctgagcggctaa

SEQ ID NO: 1569 - DNA, 1500 bp, synthetic construct
  source 1..1500: mol_type = other DNA; note = HA-FBXW7a-(GS)4-VL12.3 nucleic acid
atgtacccatacgatgttccagattacgctaatcaggaactgctctctgtgggcagcaaaagacgacgaactggaggctctctgagaggtaacccttcctcaagccaggtagatgaagaacagatgaatcgtgtggtagaggaggaacagcaacagcaactcagacaacaagaggaggagcacactgcaaggaatggtgaagttgttggagtagaacctagacctggaggccaaaatgattcccagcaaggacagttggaagaaaacaataatagatttatttcggtagatgaggactcctcaggaaaccaagaagaacaagaggaagatgaagaacatgctggtgaacaagatgaggaggatgaggaggaggaggagatggaccaggagagtgacgattttgatcagtctgatgatagtagcagagaagatgaacatacacatactaacagtgtcacgaactccagtagtattgtggacctgcccgttcaccaactctcctccccattctatacaaaaacaacaaaaatgaaaagaaagttggaccatggttctgaggtccgctctttttctttgggaaagaaaccatgcaaagtctcagaatatacaagtaccactgggcttgtaccatgttcagcaacaccaacaacttttggggacctcagagcagccaatggccaagggcaacaacgacgccgaattacatctgtccagccacctacaggcctccaggaatggctaaaaatgtttcagagctggagtggaccagagaaattgcttgctttagatgaactcattgatagttgtgaaccaacacaagtaaaacatatgatgcaagtgatagaaccccagtttcaacgagacttcatttcattgctccctaaagagttggcactctatgtgctttcattcctggaacccaaagacctgctacaagcagctcagacatgtcgctactggagaattttggctgaagacaaccttctctggagagagaaatgcaaagaagaggggattgatgaaccattgcacatcaagagaagaaaagtaataaaaccaggtttcatacacagtccatggaaaagtgcatacatcagacagcacagaattgatactaactcgaggcgaggaggcagcggcagcggcagcggcagcggcagccaacctgtgctgacacagagccccagcgtgtccgccgctcctcggcagcgggtgaccatcagcgtgtccggctctaatagcaacatcggctccaacaccgtgaactggatccagcagctgcctggaagagcccccgagctgctgatgtacgacgacgacctgctcgccccaggcgtgtctgatagattcagcggctctagaagcggcaccagcgccagcctgaccatcagcggactgcagtctgaagatgaggccgactactacgccgctacatgggacgatagcctgaacggctgggtgttcggcggcggaacaaaggtgaccgtcctgagcggctaa

SEQ ID NO: 1570 - DNA, 1506 bp, synthetic construct
  source 1..1506: mol_type = other DNA; note = HA-FBXW7a-(GS)5-VL12.3 nucleic acid
atgtacccatacgatgttccagattacgctaatcaggaactgctctctgtgggcagcaaaagacgacgaactggaggctctctgagaggtaacccttcctcaagccaggtagatgaagaacagatgaatcgtgtggtagaggaggaacagcaacagcaactcagacaacaagaggaggagcacactgcaaggaatggtgaagttgttggagtagaacctagacctggaggccaaaatgattcccagcaaggacagttggaagaaaacaataatagatttatttcggtagatgaggactcctcaggaaaccaagaagaacaagaggaagatgaagaacatgctggtgaacaagatgaggaggatgaggaggaggaggagatggaccaggagagtgacgattttgatcagtctgatgatagtagcagagaagatgaacatacacatactaacagtgtcacgaactccagtagtattgtggacctgcccgttcaccaactctcctccccattctatacaaaaacaacaaaaatgaaaagaaagttggaccatggttctgaggtccgctctttttctttgggaaagaaaccatgcaaagtctcagaatatacaagtaccactgggcttgtaccatgttcagcaacaccaacaacttttggggacctcagagcagccaatggccaagggcaacaacgacgccgaattacatctgtccagccacctacaggcctccaggaatggctaaaaatgtttcagagctggagtggaccagagaaattgcttgctttagatgaactcattgatagttgtgaaccaacacaagtaaaacatatgatgcaagtgatagaaccccagtttcaacgagacttcatttcattgctccctaaagagttggcactctatgtgctttcattcctggaacccaaagacctgctacaagcagctcagacatgtcgctactggagaattttggctgaagacaaccttctctggagagagaaatgcaaagaagaggggattgatgaaccattgcacatcaagagaagaaaagtaataaaaccaggtttcatacacagtccatggaaaagtgcatacatcagacagcacagaattgatactaactcgaggcgaggaggcagcggcagcggcagcggcagcggcagcggcagccaacctgtgctgacacagagccccagcgtgtccgccgctcctcggcagcgggtgaccatcagcgtgtccggctctaatagcaacatcggctccaacaccgtgaactggatccagcagctgcctggaagagcccccgagctgctgatgtacgacgacgacctgctcgccccaggcgtgtctgatagattcagcggctctagaagcggcaccagcgccagcctgaccatcagcggactgcagtctgaagatgaggccgactactacgccgctacatgggacgatagcctgaacggctgggtgttcggcggcggaacaaaggtgaccgtcctgagcggctaa

SEQ ID NO: 1571 - DNA, 1512 bp, synthetic construct
  source 1..1512: mol_type = other DNA; note = HA-FBXW7a-(GS)6-VL12.3 nucleic acid
atgtacccatacgatgttccagattacgctaatcaggaactgctctctgtgggcagcaaaagacgacgaactggaggctctctgagaggtaacccttcctcaagccaggtagatgaagaacagatgaatcgtgtggtagaggaggaacagcaacagcaactcagacaacaagaggaggagcacactgcaaggaatggtgaagttgttggagtagaacctagacctggaggccaaaatgattcccagcaaggacagttggaagaaaacaataatagatttatttcggtagatgaggactcctcaggaaaccaagaagaacaagaggaagatgaagaacatgctggtgaacaagatgaggaggatgaggaggaggaggagatggaccaggagagtgacgattttgatcagtctgatgatagtagcagagaagatgaacatacacatactaacagtgtcacgaactccagtagtattgtggacctgcccgttcaccaactctcctccccattctatacaaaaacaacaaaaatgaaaagaaagttggaccatggttctgaggtccgctctttttctttgggaaagaaaccatgcaaagtctcagaatatacaagtaccactgggcttgtaccatgttcagcaacaccaacaacttttggggacctcagagcagccaatggccaagggcaacaacgacgccgaattacatctgtccagccacctacaggcctccaggaatggctaaaaatgtttcagagctggagtggaccagagaaattgcttgctttagatgaactcattgatagttgtgaaccaacacaagtaaaacatatgatgcaagtgatagaaccccagtttcaacgagacttcatttcattgctccctaaagagttggcactctatgtgctttcattcctggaacccaaagacctgctacaagcagctcagacatgtcgctactggagaattttggctgaagacaaccttctctggagagagaaatgcaaagaagaggggattgatgaaccattgcacatcaagagaagaaaagtaataaaaccaggtttcatacacagtccatggaaaagtgcatacatcagacagcacagaattgatactaactcgaggcgaggaggcagcggcagcggcagcggcagcggcagcggcagcggcagccaacctgtgctgacacagagccccagcgtgtccgccgctcctcggcagcgggtgaccatcagcgtgtccggctctaatagcaacatcggctccaacaccgtgaactggatccagcagctgcctggaagagcccccgagctgctgatgtacgacgacgacctgctcgccccaggcgtgtctgatagattcagcggctctagaagcggcaccagcgccagcctgaccatcagcggactgcagtctgaagatgaggccgactactacgccgctacatgggacgatagcctgaacggctgggtgttcggcggcggaacaaaggtgaccgtcctgagcggctaa

SEQ ID NO: 1572 - DNA, 1359 bp, synthetic construct
  source 1..1359: mol_type = other DNA; note = NLS-Keap1-(GS)1-VL12.3 nucleic acid
ccggcggcgaaacgcgtgaaactggatggcagcggcagcggcagccagccagatcccaggcctagcggggctggggcctgctgccgattcctgcccctgcagtcacagtgccctgagggggcaggggacgcggtgatgtacgcctccactgagtgcaaggcggaggtgacgccctcccagcatggcaaccgcaccttcagctacaccctggaggatcataccaagcaggcctttggcatcatgaacgagctgcggctcagccagcagctgtgtgacgtcacactgcaggtcaagtaccaggatgcaccggccgcccagttcatggcccacaaggtggtgctggcctcatccagccctgtcttcaaggccatgttcaccaacgggctgcgggagcagggcatggaggtggtgtccattgagggtatccaccccaaggtcatggagcgcctcattgaattcgcctacacggcctccatctccatgggcgagaagtgtgtcctccacgtcatgaacggtgctgtcatgtaccagatcgacagcgttgtccgtgcctgcagtgacttcctggtgcagcagctggaccccagcaatgccatcggcatcgccaacttcgctgagcagattggctgtgtggagttgcaccagcgtgcccgggagtacatctacatgcattttggggaggtggccaagcaagaggagttcttcaacctgtcccactgccaactggtgaccctcatcagccgggacgacctgaacgtgcgctgcgagtccgaggtcttccacgcctgcatcaactgggtcaagtacgactgcgaacagcgacggttctacgtccaggcgctgctgcgggccgtgcgctgccactcgttgacgccgaacttcctgcagatgcagctgcagaagtgcgagatcctgcagtccgactcccgctgcaaggactacctggtcaagatcttcgaggagctcaccctgcacaagcccacgcaggtgatgccctgccgggcgcccggcagcggcagccaacctgtgctgacacagagccccagcgtgtccgccgctcctcggcagcgggtgaccatcagcgtgtccggctctaatagcaacatcggctccaacaccgtgaactggatccagcagctgcctggaagagcccccgagctgctgatgtacgacgacgacctgctcgccccaggcgtgtctgatagattcagcggctctagaagcggcaccagcgccagcctgaccatcagcggactgcagtctgaagatgaggccgactactacgccgctacatgggacgatagcctgaacggctgggtgttcggcggcggaacaaaggtgaccgtcctgagcggctaa

SEQ ID NO: 1573 - DNA, 1365 bp, synthetic construct
  source 1..1365: mol_type = other DNA; note = NLS-Keap1-(GS)2-VL12.3 nucleic acid
ccggcggcgaaacgcgtgaaactggatggcagcggcagcggcagccagccagatcccaggcctagcggggctggggcctgctgccgattcctgcccctgcagtcacagtgccctgagggggcaggggacgcggtgatgtacgcctccactgagtgcaaggcggaggtgacgccctcccagcatggcaaccgcaccttcagctacaccctggaggatcataccaagcaggcctttggcatcatgaacgagctgcggctcagccagcagctgtgtgacgtcacactgcaggtcaagtaccaggatgcaccggccgcccagttcatggcccacaaggtggtgctggcctcatccagccctgtcttcaaggccatgttcaccaacgggctgcgggagcagggcatggaggtggtgtccattgagggtatccaccccaaggtcatggagcgcctcattgaattcgcctacacggcctccatctccatgggcgagaagtgtgtcctccacgtcatgaacggtgctgtcatgtaccagatcgacagcgttgtccgtgcctgcagtgacttcctggtgcagcagctggaccccagcaatgccatcggcatcgccaacttcgctgagcagattggctgtgtggagttgcaccagcgtgcccgggagtacatctacatgcattttggggaggtggccaagcaagaggagttcttcaacctgtcccactgccaactggtgaccctcatcagccgggacgacctgaacgtgcgctgcgagtccgaggtcttccacgcctgcatcaactgggtcaagtacgactgcgaacagcgacggttctacgtccaggcgctgctgcgggccgtgcgctgccactcgttgacgccgaacttcctgcagatgcagctgcagaagtgcgagatcctgcagtccgactcccgctgcaaggactacctggtcaagatcttcgaggagctcaccctgcacaagcccacgcaggtgatgccctgccgggcgcccggcagcggcagcggcagccaacctgtgctgacacagagccccagcgtgtccgccgctcctcggcagcgggtgaccatcagcgtgtccggctctaatagcaacatcggctccaacaccgtgaactggatccagcagctgcctggaagagcccccgagctgctgatgtacgacgacgacctgctcgccccaggcgtgtctgatagattcagcggctctagaagcggcaccagcgccagcctgaccatcagcggactgcagtctgaagatgaggccgactactacgccgctacatgggacgatagcctgaacggctgggtgttcggcggcggaacaaaggtgaccgtcctgagcggctaa

SEQ ID NO: 1574 - DNA, 1371 bp, synthetic construct
  source 1..1371: mol_type = other DNA; note = NLS-Keap1-(GS)3-VL12.3 nucleic acid
ccggcggcgaaacgcgtgaaactggatggcagcggcagcggcagccagccagatcccaggcctagcggggctggggcctgctgccgattcctgcccctgcagtcacagtgccctgagggggcaggggacgcggtgatgtacgcctccactgagtgcaaggcggaggtgacgccctcccagcatggcaaccgcaccttcagctacaccctggaggatcataccaagcaggcctttggcatcatgaacgagctgcggctcagccagcagctgtgtgacgtcacactgcaggtcaagtaccaggatgcaccggccgcccagttcatggcccacaaggtggtgctggcctcatccagccctgtcttcaaggccatgttcaccaacgggctgcgggagcagggcatggaggtggtgtccattgagggtatccaccccaaggtcatggagcgcctcattgaattcgcctacacggcctccatctccatgggcgagaagtgtgtcctccacgtcatgaacggtgctgtcatgtaccagatcgacagcgttgtccgtgcctgcagtgacttcctggtgcagcagctggaccccagcaatgccatcggcatcgccaacttcgctgagcagattggctgtgtggagttgcaccagcgtgcccgggagtacatctacatgcattttggggaggtggccaagcaagaggagttcttcaacctgtcccactgccaactggtgaccctcatcagccgggacgacctgaacgtgcgctgcgagtccgaggtcttccacgcctgcatcaactgggtcaagtacgactgcgaacagcgacggttctacgtccaggcgctgctgcgggccgtgcgctgccactcgttgacgccgaacttcctgcagatgcagctgcagaagtgcgagatcctgcagtccgactcccgctgcaaggactacctggtcaagatcttcgaggagctcaccctgcacaagcccacgcaggtgatgccctgccgggcgcccggcagcggcagcggcagcggcagccaacctgtgctgacacagagccccagcgtgtccgccgctcctcggcagcgggtgaccatcagcgtgtccggctctaatagcaacatcggctccaacaccgtgaactggatccagcagctgcctggaagagcccccgagctgctgatgtacgacgacgacctgctcgccccaggcgtgtctgatagattcagcggctctagaagcggcaccagcgccagcctgaccatcagcggactgcagtctgaagatgaggccgactactacgccgctacatgggacgatagcctgaacggctgggtgttcggcggcggaacaaaggtgaccgtcctgagcggctaa

SEQ ID NO: 1575 - DNA, 1377 bp, synthetic construct
  source 1..1377: mol_type = other DNA; note = NLS-Keap1-(GS)4-VL12.3 nucleic acid
ccggcggcgaaacgcgtgaaactggatggcagcggcagcggcagccagccagatcccaggcctagcggggctggggcctgctgccgattcctgcccctgcagtcacagtgccctgagggggcaggggacgcggtgatgtacgcctccactgagtgcaaggcggaggtgacgccctcccagcatggcaaccgcaccttcagctacaccctggaggatcataccaagcaggcctttggcatcatgaacgagctgcggctcagccagcagctgtgtgacgtcacactgcaggtcaagtaccaggatgcaccggccgcccagttcatggcccacaaggtggtgctggcctcatccagccctgtcttcaaggccatgttcaccaacgggctgcgggagcagggcatggaggtggtgtccattgagggtatccaccccaaggtcatggagcgcctcattgaattcgcctacacggcctccatctccatgggcgagaagtgtgtcctccacgtcatgaacggtgctgtcatgtaccagatcgacagcgttgtccgtgcctgcagtgacttcctggtgcagcagctggaccccagcaatgccatcggcatcgccaacttcgctgagcagattggctgtgtggagttgcaccagcgtgcccgggagtacatctacatgcattttggggaggtggccaagcaagaggagttcttcaacctgtcccactgccaactggtgaccctcatcagccgggacgacctgaacgtgcgctgcgagtccgaggtcttccacgcctgcatcaactgggtcaagtacgactgcgaacagcgacggttctacgtccaggcgctgctgcgggccgtgcgctgccactcgttgacgccgaacttcctgcagatgcagctgcagaagtgcgagatcctgcagtccgactcccgctgcaaggactacctggtcaagatcttcgaggagctcaccctgcacaagcccacgcaggtgatgccctgccgggcgcccggcagcggcagcggcagcggcagcggcagccaacctgtgctgacacagagccccagcgtgtccgccgctcctcggcagcgggtgaccatcagcgtgtccggctctaatagcaacatcggctccaacaccgtgaactggatccagcagctgcctggaagagcccccgagctgctgatgtacgacgacgacctgctcgccccaggcgtgtctgatagattcagcggctctagaagcggcaccagcgccagcctgaccatcagcggactgcagtctgaagatgaggccgactactacgccgctacatgggacgatagcctgaacggctgggtgttcggcggcggaacaaaggtgaccgtcctgagcggctaa

SEQ ID NO: 1576 - DNA, 1383 bp, synthetic construct
  source 1..1383: mol_type = other DNA; note = NLS-Keap1-(GS)5-VL12.3 nucleic acid
ccggcggcgaaacgcgtgaaactggatggcagcggcagcggcagccagccagatcccaggcctagcggggctggggcctgctgccgattcctgcccctgcagtcacagtgccctgagggggcaggggacgcggtgatgtacgcctccactgagtgcaaggcggaggtgacgccctcccagcatggcaaccgcaccttcagctacaccctggaggatcataccaagcaggcctttggcatcatgaacgagctgcggctcagccagcagctgtgtgacgtcacactgcaggtcaagtaccaggatgcaccggccgcccagttcatggcccacaaggtggtgctggcctcatccagccctgtcttcaaggccatgttcaccaacgggctgcgggagcagggcatggaggtggtgtccattgagggtatccaccccaaggtcatggagcgcctcattgaattcgcctacacggcctccatctccatgggcgagaagtgtgtcctccacgtcatgaacggtgctgtcatgtaccagatcgacagcgttgtccgtgcctgcagtgacttcctggtgcagcagctggaccccagcaatgccatcggcatcgccaacttcgctgagcagattggctgtgtggagttgcaccagcgtgcccgggagtacatctacatgcattttggggaggtggccaagcaagaggagttcttcaacctgtcccactgccaactggtgaccctcatcagccgggacgacctgaacgtgcgctgcgagtccgaggtcttccacgcctgcatcaactgggtcaagtacgactgcgaacagcgacggttctacgtccaggcgctgctgcgggccgtgcgctgccactcgttgacgccgaacttcctgcagatgcagctgcagaagtgcgagatcctgcagtccgactcccgctgcaaggactacctggtcaagatcttcgaggagctcaccctgcacaagcccacgcaggtgatgccctgccgggcgcccggcagcggcagcggcagcggcagcggcagcggcagccaacctgtgctgacacagagccccagcgtgtccgccgctcctcggcagcgggtgaccatcagcgtgtccggctctaatagcaacatcggctccaacaccgtgaactggatccagcagctgcctggaagagcccccgagctgctgatgtacgacgacgacctgctcgccccaggcgtgtctgatagattcagcggctctagaagcggcaccagcgccagcctgaccatcagcggactgcagtctgaagatgaggccgactactacgccgctacatgggacgatagcctgaacggctgggtgttcggcggcggaacaaaggtgaccgtcctgagcggctaa

SEQ ID NO: 1577 - DNA, 1389 bp, synthetic construct
  source 1..1389: mol_type = other DNA; note = NLS-Keap1-(GS)6-VL12.3 nucleic acid
ccggcggcgaaacgcgtgaaactggatggcagcggcagcggcagccagccagatcccaggcctagcggggctggggcctgctgccgattcctgcccctgcagtcacagtgccctgagggggcaggggacgcggtgatgtacgcctccactgagtgcaaggcggaggtgacgccctcccagcatggcaaccgcaccttcagctacaccctggaggatcataccaagcaggcctttggcatcatgaacgagctgcggctcagccagcagctgtgtgacgtcacactgcaggtcaagtaccaggatgcaccggccgcccagttcatggcccacaaggtggtgctggcctcatccagccctgtcttcaaggccatgttcaccaacgggctgcgggagcagggcatggaggtggtgtccattgagggtatccaccccaaggtcatggagcgcctcattgaattcgcctacacggcctccatctccatgggcgagaagtgtgtcctccacgtcatgaacggtgctgtcatgtaccagatcgacagcgttgtccgtgcctgcagtgacttcctggtgcagcagctggaccccagcaatgccatcggcatcgccaacttcgctgagcagattggctgtgtggagttgcaccagcgtgcccgggagtacatctacatgcattttggggaggtggccaagcaagaggagttcttcaacctgtcccactgccaactggtgaccctcatcagccgggacgacctgaacgtgcgctgcgagtccgaggtcttccacgcctgcatcaactgggtcaagtacgactgcgaacagcgacggttctacgtccaggcgctgctgcgggccgtgcgctgccactcgttgacgccgaacttcctgcagatgcagctgcagaagtgcgagatcctgcagtccgactcccgctgcaaggactacctggtcaagatcttcgaggagctcaccctgcacaagcccacgcaggtgatgccctgccgggcgcccggcagcggcagcggcagcggcagcggcagcggcagcggcagccaacctgtgctgacacagagccccagcgtgtccgccgctcctcggcagcgggtgaccatcagcgtgtccggctctaatagcaacatcggctccaacaccgtgaactggatccagcagctgcctggaagagcccccgagctgctgatgtacgacgacgacctgctcgccccaggcgtgtctgatagattcagcggctctagaagcggcaccagcgccagcctgaccatcagcggactgcagtctgaagatgaggccgactactacgccgctacatgggacgatagcctgaacggctgggtgttcggcggcggaacaaaggtgaccgtcctgagcggctaa

SEQ ID NO: 1578 - DNA, 1389 bp, synthetic construct
  source 1..1389: mol_type = other DNA; note = HA-NLS-Keap1-(GS)1-VL12.3 nucleic acid
atgtacccatacgatgttccagattacgctccggcggcgaaacgcgtgaaactggatggcagcggcagcggcagccagccagatcccaggcctagcggggctggggcctgctgccgattcctgcccctgcagtcacagtgccctgagggggcaggggacgcggtgatgtacgcctccactgagtgcaaggcggaggtgacgccctcccagcatggcaaccgcaccttcagctacaccctggaggatcataccaagcaggcctttggcatcatgaacgagctgcggctcagccagcagctgtgtgacgtcacactgcaggtcaagtaccaggatgcaccggccgcccagttcatggcccacaaggtggtgctggcctcatccagccctgtcttcaaggccatgttcaccaacgggctgcgggagcagggcatggaggtggtgtccattgagggtatccaccccaaggtcatggagcgcctcattgaattcgcctacacggcctccatctccatgggcgagaagtgtgtcctccacgtcatgaacggtgctgtcatgtaccagatcgacagcgttgtccgtgcctgcagtgacttcctggtgcagcagctggaccccagcaatgccatcggcatcgccaacttcgctgagcagattggctgtgtggagttgcaccagcgtgcccgggagtacatctacatgcattttggggaggtggccaagcaagaggagttcttcaacctgtcccactgccaactggtgaccctcatcagccgggacgacctgaacgtgcgctgcgagtccgaggtcttccacgcctgcatcaactgggtcaagtacgactgcgaacagcgacggttctacgtccaggcgctgctgcgggccgtgcgctgccactcgttgacgccgaacttcctgcagatgcagctgcagaagtgcgagatcctgcagtccgactcccgctgcaaggactacctggtcaagatcttcgaggagctcaccctgcacaagcccacgcaggtgatgccctgccgggcgcccggcagcggcagccaacctgtgctgacacagagccccagcgtgtccgccgctcctcggcagcgggtgaccatcagcgtgtccggctctaatagcaacatcggctccaacaccgtgaactggatccagcagctgcctggaagagcccccgagctgctgatgtacgacgacgacctgctcgccccaggcgtgtctgatagattcagcggctctagaagcggcaccagcgccagcctgaccatcagcggactgcagtctgaagatgaggccgactactacgccgctacatgggacgatagcctgaacggctgggtgttcggcggcggaacaaaggtgaccgtcctgagcggctaa

SEQ ID NO: 1579 - DNA, 1395 bp, synthetic construct
  source 1..1395: mol_type = other DNA; note = HA-NLS-Keap1-(GS)2-VL12.3 nucleic acid
atgtacccatacgatgttccagattacgctccggcggcgaaacgcgtgaaactggatggcagcggcagcggcagccagccagatcccaggcctagcggggctggggcctgctgccgattcctgcccctgcagtcacagtgccctgagggggcaggggacgcggtgatgtacgcctccactgagtgcaaggcggaggtgacgccctcccagcatggcaaccgcaccttcagctacaccctggaggatcataccaagcaggcctttggcatcatgaacgagctgcggctcagccagcagctgtgtgacgtcacactgcaggtcaagtaccaggatgcaccggccgcccagttcatggcccacaaggtggtgctggcctcatccagccctgtcttcaaggccatgttcaccaacgggctgcgggagcagggcatggaggtggtgtccattgagggtatccaccccaaggtcatggagcgcctcattgaattcgcctacacggcctccatctccatgggcgagaagtgtgtcctccacgtcatgaacggtgctgtcatgtaccagatcgacagcgttgtccgtgcctgcagtgacttcctggtgcagcagctggaccccagcaatgccatcggcatcgccaacttcgctgagcagattggctgtgtggagttgcaccagcgtgcccgggagtacatctacatgcattttggggaggtggccaagcaagaggagttcttcaacctgtcccactgccaactggtgaccctcatcagccgggacgacctgaacgtgcgctgcgagtccgaggtcttccacgcctgcatcaactgggtcaagtacgactgcgaacagcgacggttctacgtccaggcgctgctgcgggccgtgcgctgccactcgttgacgccgaacttcctgcagatgcagctgcagaagtgcgagatcctgcagtccgactcccgctgcaaggactacctggtcaagatcttcgaggagctcaccctgcacaagcccacgcaggtgatgccctgccgggcgcccggcagcggcagcggcagccaacctgtgctgacacagagccccagcgtgtccgccgctcctcggcagcgggtgaccatcagcgtgtccggctctaatagcaacatcggctccaacaccgtgaactggatccagcagctgcctggaagagcccccgagctgctgatgtacgacgacgacctgctcgccccaggcgtgtctgatagattcagcggctctagaagcggcaccagcgccagcctgaccatcagcggactgcagtctgaagatgaggccgactactacgccgctacatgggacgatagcctgaacggctgggtgttcggcggcggaacaaaggtgaccgtcctgagcggctaa

SEQ ID NO: 1580 - DNA, 1401 bp, synthetic construct
  source 1..1401: mol_type = other DNA; note = HA-NLS-Keap1-(GS)3-VL12.3 nucleic acid
atgtacccatacgatgttccagattacgctccggcggcgaaacgcgtgaaactggatggcagcggcagcggcagccagccagatcccaggcctagcggggctggggcctgctgccgattcctgcccctgcagtcacagtgccctgagggggcaggggacgcggtgatgtacgcctccactgagtgcaaggcggaggtgacgccctcccagcatggcaaccgcaccttcagctacaccctggaggatcataccaagcaggcctttggcatcatgaacgagctgcggctcagccagcagctgtgtgacgtcacactgcaggtcaagtaccaggatgcaccggccgcccagttcatggcccacaaggtggtgctggcctcatccagccctgtcttcaaggccatgttcaccaacgggctgcgggagcagggcatggaggtggtgtccattgagggtatccaccccaaggtcatggagcgcctcattgaattcgcctacacggcctccatctccatgggcgagaagtgtgtcctccacgtcatgaacggtgctgtcatgtaccagatcgacagcgttgtccgtgcctgcagtgacttcctggtgcagcagctggaccccagcaatgccatcggcatcgccaacttcgctgagcagattggctgtgtggagttgcaccagcgtgcccgggagtacatctacatgcattttggggaggtggccaagcaagaggagttcttcaacctgtcccactgccaactggtgaccctcatcagccgggacgacctgaacgtgcgctgcgagtccgaggtcttccacgcctgcatcaactgggtcaagtacgactgcgaacagcgacggttctacgtccaggcgctgctgcgggccgtgcgctgccactcgttgacgccgaacttcctgcagatgcagctgcagaagtgcgagatcctgcagtccgactcccgctgcaaggactacctggtcaagatcttcgaggagctcaccctgcacaagcccacgcaggtgatgccctgccgggcgcccggcagcggcagcggcagcggcagccaacctgtgctgacacagagccccagcgtgtccgccgctcctcggcagcgggtgaccatcagcgtgtccggctctaatagcaacatcggctccaacaccgtgaactggatccagcagctgcctggaagagcccccgagctgctgatgtacgacgacgacctgctcgccccaggcgtgtctgatagattcagcggctctagaagcggcaccagcgccagcctgaccatcagcggactgcagtctgaagatgaggccgactactacgccgctacatgggacgatagcctgaacggctgggtgttcggcggcggaacaaaggtgaccgtcctgagcggctaa

SEQ ID NO: 1581 - DNA, 1407 bp, synthetic construct
  source 1..1407: mol_type = other DNA; note = HA-NLS-Keap1-(GS)4-VL12.3 nucleic acid
atgtacccatacgatgttccagattacgctccggcggcgaaacgcgtgaaactggatggcagcggcagcggcagccagccagatcccaggcctagcggggctggggcctgctgccgattcctgcccctgcagtcacagtgccctgagggggcaggggacgcggtgatgtacgcctccactgagtgcaaggcggaggtgacgccctcccagcatggcaaccgcaccttcagctacaccctggaggatcataccaagcaggcctttggcatcatgaacgagctgcggctcagccagcagctgtgtgacgtcacactgcaggtcaagtaccaggatgcaccggccgcccagttcatggcccacaaggtggtgctggcctcatccagccctgtcttcaaggccatgttcaccaacgggctgcgggagcagggcatggaggtggtgtccattgagggtatccaccccaaggtcatggagcgcctcattgaattcgcctacacggcctccatctccatgggcgagaagtgtgtcctccacgtcatgaacggtgctgtcatgtaccagatcgacagcgttgtccgtgcctgcagtgacttcctggtgcagcagctggaccccagcaatgccatcggcatcgccaacttcgctgagcagattggctgtgtggagttgcaccagcgtgcccgggagtacatctacatgcattttggggaggtggccaagcaagaggagttcttcaacctgtcccactgccaactggtgaccctcatcagccgggacgacctgaacgtgcgctgcgagtccgaggtcttccacgcctgcatcaactgggtcaagtacgactgcgaacagcgacggttctacgtccaggcgctgctgcgggccgtgcgctgccactcgttgacgccgaacttcctgcagatgcagctgcagaagtgcgagatcctgcagtccgactcccgctgcaaggactacctggtcaagatcttcgaggagctcaccctgcacaagcccacgcaggtgatgccctgccgggcgcccggcagcggcagcggcagcggcagcggcagccaacctgtgctgacacagagccccagcgtgtccgccgctcctcggcagcgggtgaccatcagcgtgtccggctctaatagcaacatcggctccaacaccgtgaactggatccagcagctgcctggaagagcccccgagctgctgatgtacgacgacgacctgctcgccccaggcgtgtctgatagattcagcggctctagaagcggcaccagcgccagcctgaccatcagcggactgcagtctgaagatgaggccgactactacgccgctacatgggacgatagcctgaacggctgggtgttcggcggcggaacaaaggtgaccgtcctgagcggctaa

SEQ ID NO: 1582 - DNA, 1413 bp, synthetic construct
  source 1..1413: mol_type = other DNA; note = HA-NLS-Keap1-(GS)5-VL12.3 nucleic acid
atgtacccatacgatgttccagattacgctccggcggcgaaacgcgtgaaactggatggcagcggcagcggcagccagccagatcccaggcctagcggggctggggcctgctgccgattcctgcccctgcagtcacagtgccctgagggggcaggggacgcggtgatgtacgcctccactgagtgcaaggcggaggtgacgccctcccagcatggcaaccgcaccttcagctacaccctggaggatcataccaagcaggcctttggcatcatgaacgagctgcggctcagccagcagctgtgtgacgtcacactgcaggtcaagtaccaggatgcaccggccgcccagttcatggcccacaaggtggtgctggcctcatccagccctgtcttcaaggccatgttcaccaacgggctgcgggagcagggcatggaggtggtgtccattgagggtatccaccccaaggtcatggagcgcctcattgaattcgcctacacggcctccatctccatgggcgagaagtgtgtcctccacgtcatgaacggtgctgtcatgtaccagatcgacagcgttgtccgtgcctgcagtgacttcctggtgcagcagctggaccccagcaatgccatcggcatcgccaacttcgctgagcagattggctgtgtggagttgcaccagcgtgcccgggagtacatctacatgcattttggggaggtggccaagcaagaggagttcttcaacctgtcccactgccaactggtgaccctcatcagccgggacgacctgaacgtgcgctgcgagtccgaggtcttccacgcctgcatcaactgggtcaagtacgactgcgaacagcgacggttctacgtccaggcgctgctgcgggccgtgcgctgccactcgttgacgccgaacttcctgcagatgcagctgcagaagtgcgagatcctgcagtccgactcccgctgcaaggactacctggtcaagatcttcgaggagctcaccctgcacaagcccacgcaggtgatgccctgccgggcgcccggcagcggcagcggcagcggcagcggcagcggcagccaacctgtgctgacacagagccccagcgtgtccgccgctcctcggcagcgggtgaccatcagcgtgtccggctctaatagcaacatcggctccaacaccgtgaactggatccagcagctgcctggaagagcccccgagctgctgatgtacgacgacgacctgctcgccccaggcgtgtctgatagattcagcggctctagaagcggcaccagcgccagcctgaccatcagcggactgcagtctgaagatgaggccgactactacgccgctacatgggacgatagcctgaacggctgggtgttcggcggcggaacaaaggtgaccgtcctgagcggctaa

SEQ ID NO: 1583 - DNA, 1419 bp, synthetic construct
  source 1..1419: mol_type = other DNA; note = HA-NLS-Keap1-(GS)6-VL12.3 nucleic acid
atgtacccatacgatgttccagattacgctccggcggcgaaacgcgtgaaactggatggcagcggcagcggcagccagccagatcccaggcctagcggggctggggcctgctgccgattcctgcccctgcagtcacagtgccctgagggggcaggggacgcggtgatgtacgcctccactgagtgcaaggcggaggtgacgccctcccagcatggcaaccgcaccttcagctacaccctggaggatcataccaagcaggcctttggcatcatgaacgagctgcggctcagccagcagctgtgtgacgtcacactgcaggtcaagtaccaggatgcaccggccgcccagttcatggcccacaaggtggtgctggcctcatccagccctgtcttcaaggccatgttcaccaacgggctgcgggagcagggcatggaggtggtgtccattgagggtatccaccccaaggtcatggagcgcctcattgaattcgcctacacggcctccatctccatgggcgagaagtgtgtcctccacgtcatgaacggtgctgtcatgtaccagatcgacagcgttgtccgtgcctgcagtgacttcctggtgcagcagctggaccccagcaatgccatcggcatcgccaacttcgctgagcagattggctgtgtggagttgcaccagcgtgcccgggagtacatctacatgcattttggggaggtggccaagcaagaggagttcttcaacctgtcccactgccaactggtgaccctcatcagccgggacgacctgaacgtgcgctgcgagtccgaggtcttccacgcctgcatcaactgggtcaagtacgactgcgaacagcgacggttctacgtccaggcgctgctgcgggccgtgcgctgccactcgttgacgccgaacttcctgcagatgcagctgcagaagtgcgagatcctgcagtccgactcccgctgcaaggactacctggtcaagatcttcgaggagctcaccctgcacaagcccacgcaggtgatgccctgccgggcgcccggcagcggcagcggcagcggcagcggcagcggcagcggcagccaacctgtgctgacacagagccccagcgtgtccgccgctcctcggcagcgggtgaccatcagcgtgtccggctctaatagcaacatcggctccaacaccgtgaactggatccagcagctgcctggaagagcccccgagctgctgatgtacgacgacgacctgctcgccccaggcgtgtctgatagattcagcggctctagaagcggcaccagcgccagcctgaccatcagcggactgcagtctgaagatgaggccgactactacgccgctacatgggacgatagcctgaacggctgggtgttcggcggcggaacaaaggtgaccgtcctgagcggctaa

SEQ ID NO: 1584 - DNA, 777 bp, synthetic construct
  source 1..777: mol_type = other DNA; note = NLS-RNF125-(GS)1-VL12.3 nucleic acid
ccggcggcgaaacgcgtgaaactggatggcagcggcagcggcagcggctccgtgctgagcaccgacagcggcaaatcggcgcccgcctctgccaccgcgcgggccctggagcgcaggagggacccggagttgcccgtcacgtccttcgactgcgccgtgtgccttgaggtgttacaccagcctgtccggacccgctgcggccacgtattctgccgttcctgtattgctaccagtctgaagaacaacaagtggacctgtccttattgccgggcatatcttccttcagaaggagttccagcaactgatgtagccaaaagaatgaaatcagagtataagaactgcgctgagtgtgacaccctggtttgcctcagtgaaatgagggcacatattcggacttgtcagaagtacatagataagtatggaccaggcagcggcagccaacctgtgctgacacagagccccagcgtgtccgccgctcctcggcagcgggtgaccatcagcgtgtccggctctaatagcaacatcggctccaacaccgtgaactggatccagcagctgcctggaagagcccccgagctgctgatgtacgacgacgacctgctcgccccaggcgtgtctgatagattcagcggctctagaagcggcaccagcgccagcctgaccatcagcggactgcagtctgaagatgaggccgactactacgccgctacatgggacgatagcctgaacggctgggtgttcggcggcggaacaaaggtgaccgtcctgagcggctaa

SEQ ID NO: 1585 - DNA, 783 bp, synthetic construct
  source 1..783: mol_type = other DNA; note = NLS-RNF125-(GS)2-VL12.3 nucleic acid
ccggcggcgaaacgcgtgaaactggatggcagcggcagcggcagcggctccgtgctgagcaccgacagcggcaaatcggcgcccgcctctgccaccgcgcgggccctggagcgcaggagggacccggagttgcccgtcacgtccttcgactgcgccgtgtgccttgaggtgttacaccagcctgtccggacccgctgcggccacgtattctgccgttcctgtattgctaccagtctgaagaacaacaagtggacctgtccttattgccgggcatatcttccttcagaaggagttccagcaactgatgtagccaaaagaatgaaatcagagtataagaactgcgctgagtgtgacaccctggtttgcctcagtgaaatgagggcacatattcggacttgtcagaagtacatagataagtatggaccaggcagcggcagcggcagccaacctgtgctgacacagagccccagcgtgtccgccgctcctcggcagcgggtgaccatcagcgtgtccggctctaatagcaacatcggctccaacaccgtgaactggatccagcagctgcctggaagagcccccgagctgctgatgtacgacgacgacctgctcgccccaggcgtgtctgatagattcagcggctctagaagcggcaccagcgccagcctgaccatcagcggactgcagtctgaagatgaggccgactactacgccgctacatgggacgatagcctgaacggctgggtgttcggcggcggaacaaaggtgaccgtcctgagcggctaa

SEQ ID NO: 1586 - DNA, 789 bp, synthetic construct
  source 1..789: mol_type = other DNA; note = NLS-RNF125-(GS)3-VL12.3 nucleic acid
ccggcggcgaaacgcgtgaaactggatggcagcggcagcggcagcggctccgtgctgagcaccgacagcggcaaatcggcgcccgcctctgccaccgcgcgggccctggagcgcaggagggacccggagttgcccgtcacgtccttcgactgcgccgtgtgccttgaggtgttacaccagcctgtccggacccgctgcggccacgtattctgccgttcctgtattgctaccagtctgaagaacaacaagtggacctgtccttattgccgggcatatcttccttcagaaggagttccagcaactgatgtagccaaaagaatgaaatcagagtataagaactgcgctgagtgtgacaccctggtttgcctcagtgaaatgagggcacatattcggacttgtcagaagtacatagataagtatggaccaggcagcggcagcggcagcggcagccaacctgtgctgacacagagccccagcgtgtccgccgctcctcggcagcgggtgaccatcagcgtgtccggctctaatagcaacatcggctccaacaccgtgaactggatccagcagctgcctggaagagcccccgagctgctgatgtacgacgacgacctgctcgccccaggcgtgtctgatagattcagcggctctagaagcggcaccagcgccagcctgaccatcagcggactgcagtctgaagatgaggccgactactacgccgctacatgggacgatagcctgaacggctgggtgttcggcggcggaacaaaggtgaccgtcctgagcggctaa

SEQ ID NO: 1587 - DNA, 795 bp, synthetic construct
  source 1..795: mol_type = other DNA; note = NLS-RNF125-(GS)4-VL12.3 nucleic acid
ccggcggcgaaacgcgtgaaactggatggcagcggcagcggcagcggctccgtgctgagcaccgacagcggcaaatcggcgcccgcctctgccaccgcgcgggccctggagcgcaggagggacccggagttgcccgtcacgtccttcgactgcgccgtgtgccttgaggtgttacaccagcctgtccggacccgctgcggccacgtattctgccgttcctgtattgctaccagtctgaagaacaacaagtggacctgtccttattgccgggcatatcttccttcagaaggagttccagcaactgatgtagccaaaagaatgaaatcagagtataagaactgcgctgagtgtgacaccctggtttgcctcagtgaaatgagggcacatattcggacttgtcagaagtacatagataagtatggaccaggcagcggcagcggcagcggcagcggcagccaacctgtgctgacacagagccccagcgtgtccgccgctcctcggcagcgggtgaccatcagcgtgtccggctctaatagcaacatcggctccaacaccgtgaactggatccagcagctgcctggaagagcccccgagctgctgatgtacgacgacgacctgctcgccccaggcgtgtctgatagattcagcggctctagaagcggcaccagcgccagcctgaccatcagcggactgcagtctgaagatgaggccgactactacgccgctacatgggacgatagcctgaacggctgggtgttcggcggcggaacaaaggtgaccgtcctgagcggctaa

SEQ ID NO: 1588 - DNA, 801 bp, synthetic construct
  source 1..801: mol_type = other DNA; note = NLS-RNF125-(GS)5-VL12.3 nucleic acid
ccggcggcgaaacgcgtgaaactggatggcagcggcagcggcagcggctccgtgctgagcaccgacagcggcaaatcggcgcccgcctctgccaccgcgcgggccctggagcgcaggagggacccggagttgcccgtcacgtccttcgactgcgccgtgtgccttgaggtgttacaccagcctgtccggacccgctgcggccacgtattctgccgttcctgtattgctaccagtctgaagaacaacaagtggacctgtccttattgccgggcatatcttccttcagaaggagttccagcaactgatgtagccaaaagaatgaaatcagagtataagaactgcgctgagtgtgacaccctggtttgcctcagtgaaatgagggcacatattcggacttgtcagaagtacatagataagtatggaccaggcagcggcagcggcagcggcagcggcagcggcagccaacctgtgctgacacagagccccagcgtgtccgccgctcctcggcagcgggtgaccatcagcgtgtccggctctaatagcaacatcggctccaacaccgtgaactggatccagcagctgcctggaagagcccccgagctgctgatgtacgacgacgacctgctcgccccaggcgtgtctgatagattcagcggctctagaagcggcaccagcgccagcctgaccatcagcggactgcagtctgaagatgaggccgactactacgccgctacatgggacgatagcctgaacggctgggtgttcggcggcggaacaaaggtgaccgtcctgagcggctaa

SEQ ID NO: 1589 - DNA, 807 bp, synthetic construct
  source 1..807: mol_type = other DNA; note = NLS-RNF125-(GS)6-VL12.3 nucleic acid
ccggcggcgaaacgcgtgaaactggatggcagcggcagcggcagcggctccgtgctgagcaccgacagcggcaaatcggcgcccgcctctgccaccgcgcgggccctggagcgcaggagggacccggagttgcccgtcacgtccttcgactgcgccgtgtgccttgaggtgttacaccagcctgtccggacccgctgcggccacgtattctgccgttcctgtattgctaccagtctgaagaacaacaagtggacctgtccttattgccgggcatatcttccttcagaaggagttccagcaactgatgtagccaaaagaatgaaatcagagtataagaactgcgctgagtgtgacaccctggtttgcctcagtgaaatgagggcacatattcggacttgtcagaagtacatagataagtatggaccaggcagcggcagcggcagcggcagcggcagcggcagcggcagccaacctgtgctgacacagagccccagcgtgtccgccgctcctcggcagcgggtgaccatcagcgtgtccggctctaatagcaacatcggctccaacaccgtgaactggatccagcagctgcctggaagagcccccgagctgctgatgtacgacgacgacctgctcgccccaggcgtgtctgatagattcagcggctctagaagcggcaccagcgccagcctgaccatcagcggactgcagtctgaagatgaggccgactactacgccgctacatgggacgatagcctgaacggctgggtgttcggcggcggaacaaaggtgaccgtcctgagcggctaa

SEQ ID NO: 1590 - DNA, 807 bp, synthetic construct
  source 1..807: mol_type = other DNA; note = HA-NLS-RNF125-(GS)1-VL12.3 nucleic acid
atgtacccatacgatgttccagattacgctccggcggcgaaacgcgtgaaactggatggcagcggcagcggcagcggctccgtgctgagcaccgacagcggcaaatcggcgcccgcctctgccaccgcgcgggccctggagcgcaggagggacccggagttgcccgtcacgtccttcgactgcgccgtgtgccttgaggtgttacaccagcctgtccggacccgctgcggccacgtattctgccgttcctgtattgctaccagtctgaagaacaacaagtggacctgtccttattgccgggcatatcttccttcagaaggagttccagcaactgatgtagccaaaagaatgaaatcagagtataagaactgcgctgagtgtgacaccctggtttgcctcagtgaaatgagggcacatattcggacttgtcagaagtacatagataagtatggaccaggcagcggcagccaacctgtgctgacacagagccccagcgtgtccgccgctcctcggcagcgggtgaccatcagcgtgtccggctctaatagcaacatcggctccaacaccgtgaactggatccagcagctgcctggaagagcccccgagctgctgatgtacgacgacgacctgctcgccccaggcgtgtctgatagattcagcggctctagaagcggcaccagcgccagcctgaccatcagcggactgcagtctgaagatgaggccgactactacgccgctacatgggacgatagcctgaacggctgggtgttcggcggcggaacaaaggtgaccgtcctgagcggctaa

SEQ ID NO: 1591 - DNA, 813 bp, synthetic construct
  source 1..813: mol_type = other DNA; note = HA-NLS-RNF125-(GS)2-VL12.3 nucleic acid
atgtacccatacgatgttccagattacgctccggcggcgaaacgcgtgaaactggatggcagcggcagcggcagcggctccgtgctgagcaccgacagcggcaaatcggcgcccgcctctgccaccgcgcgggccctggagcgcaggagggacccggagttgcccgtcacgtccttcgactgcgccgtgtgccttgaggtgttacaccagcctgtccggacccgctgcggccacgtattctgccgttcctgtattgctaccagtctgaagaacaacaagtggacctgtccttattgccgggcatatcttccttcagaaggagttccagcaactgatgtagccaaaagaatgaaatcagagtataagaactgcgctgagtgtgacaccctggtttgcctcagtgaaatgagggcacatattcggacttgtcagaagtacatagataagtatggaccaggcagcggcagcggcagccaacctgtgctgacacagagccccagcgtgtccgccgctcctcggcagcgggtgaccatcagcgtgtccggctctaatagcaacatcggctccaacaccgtgaactggatccagcagctgcctggaagagcccccgagctgctgatgtacgacgacgacctgctcgccccaggcgtgtctgatagattcagcggctctagaagcggcaccagcgccagcctgaccatcagcggactgcagtctgaagatgaggccgactactacgccgctacatgggacgatagcctgaacggctgggtgttcggcggcggaacaaaggtgaccgtcctgagcggctaa

SEQ ID NO: 1592 - DNA, 819 bp, synthetic construct
  source 1..819: mol_type = other DNA; note = HA-NLS-RNF125-(GS)3-VL12.3 nucleic acid
atgtacccatacgatgttccagattacgctccggcggcgaaacgcgtgaaactggatggcagcggcagcggcagcggctccgtgctgagcaccgacagcggcaaatcggcgcccgcctctgccaccgcgcgggccctggagcgcaggagggacccggagttgcccgtcacgtccttcgactgcgccgtgtgccttgaggtgttacaccagcctgtccggacccgctgcggccacgtattctgccgttcctgtattgctaccagtctgaagaacaacaagtggacctgtccttattgccgggcatatcttccttcagaaggagttccagcaactgatgtagccaaaagaatgaaatcagagtataagaactgcgctgagtgtgacaccctggtttgcctcagtgaaatgagggcacatattcggacttgtcagaagtacatagataagtatggaccaggcagcggcagcggcagcggcagccaacctgtgctgacacagagccccagcgtgtccgccgctcctcggcagcgggtgaccatcagcgtgtccggctctaatagcaacatcggctccaacaccgtgaactggatccagcagctgcctggaagagcccccgagctgctgatgtacgacgacgacctgctcgccccaggcgtgtctgatagattcagcggctctagaagcggcaccagcgccagcctgaccatcagcggactgcagtctgaagatgaggccgactactacgccgctacatgggacgatagcctgaacggctgggtgttcggcggcggaacaaaggtgaccgtcctgagcggctaa

SEQ ID NO: 1593 - DNA, 825 bp, synthetic construct
  source 1..825: mol_type = other DNA; note = HA-NLS-RNF125-(GS)4-VL12.3 nucleic acid
atgtacccatacgatgttccagattacgctccggcggcgaaacgcgtgaaactggatggcagcggcagcggcagcggctccgtgctgagcaccgacagcggcaaatcggcgcccgcctctgccaccgcgcgggccctggagcgcaggagggacccggagttgcccgtcacgtccttcgactgcgccgtgtgccttgaggtgttacaccagcctgtccggacccgctgcggccacgtattctgccgttcctgtattgctaccagtctgaagaacaacaagtggacctgtccttattgccgggcatatcttccttcagaaggagttccagcaactgatgtagccaaaagaatgaaatcagagtataagaactgcgctgagtgtgacaccctggtttgcctcagtgaaatgagggcacatattcggacttgtcagaagtacatagataagtatggaccaggcagcggcagcggcagcggcagcggcagccaacctgtgctgacacagagccccagcgtgtccgccgctcctcggcagcgggtgaccatcagcgtgtccggctctaatagcaacatcggctccaacaccgtgaactggatccagcagctgcctggaagagcccccgagctgctgatgtacgacgacgacctgctcgccccaggcgtgtctgatagattcagcggctctagaagcggcaccagcgccagcctgaccatcagcggactgcagtctgaagatgaggccgactactacgccgctacatgggacgatagcctgaacggctgggtgttcggcggcggaacaaaggtgaccgtcctgagcggctaa

SEQ ID NO: 1594 - DNA, 831 bp, synthetic construct
  source 1..831: mol_type = other DNA; note = HA-NLS-RNF125-(GS)5-VL12.3 nucleic acid
atgtacccatacgatgttccagattacgctccggcggcgaaacgcgtgaaactggatggcagcggcagcggcagcggctccgtgctgagcaccgacagcggcaaatcggcgcccgcctctgccaccgcgcgggccctggagcgcaggagggacccggagttgcccgtcacgtccttcgactgcgccgtgtgccttgaggtgttacaccagcctgtccggacccgctgcggccacgtattctgccgttcctgtattgctaccagtctgaagaacaacaagtggacctgtccttattgccgggcatatcttccttcagaaggagttccagcaactgatgtagccaaaagaatgaaatcagagtataagaactgcgctgagtgtgacaccctggtttgcctcagtgaaatgagggcacatattcggacttgtcagaagtacatagataagtatggaccaggcagcggcagcggcagcggcagcggcagcggcagccaacctgtgctgacacagagccccagcgtgtccgccgctcctcggcagcgggtgaccatcagcgtgtccggctctaatagcaacatcggctccaacaccgtgaactggatccagcagctgcctggaagagcccccgagctgctgatgtacgacgacgacctgctcgccccaggcgtgtctgatagattcagcggctctagaagcggcaccagcgccagcctgaccatcagcggactgcagtctgaagatgaggccgactactacgccgctacatgggacgatagcctgaacggctgggtgttcggcggcggaacaaaggtgaccgtcctgagcggctaa

SEQ ID NO: 1595 - DNA, 837 bp, synthetic construct
  source 1..837: mol_type = other DNA; note = HA-NLS-RNF125-(GS)6-VL12.3 nucleic acid
atgtacccatacgatgttccagattacgctccggcggcgaaacgcgtgaaactggatggcagcggcagcggcagcggctccgtgctgagcaccgacagcggcaaatcggcgcccgcctctgccaccgcgcgggccctggagcgcaggagggacccggagttgcccgtcacgtccttcgactgcgccgtgtgccttgaggtgttacaccagcctgtccggacccgctgcggccacgtattctgccgttcctgtattgctaccagtctgaagaacaacaagtggacctgtccttattgccgggcatatcttccttcagaaggagttccagcaactgatgtagccaaaagaatgaaatcagagtataagaactgcgctgagtgtgacaccctggtttgcctcagtgaaatgagggcacatattcggacttgtcagaagtacatagataagtatggaccaggcagcggcagcggcagcggcagcggcagcggcagcggcagccaacctgtgctgacacagagccccagcgtgtccgccgctcctcggcagcgggtgaccatcagcgtgtccggctctaatagcaacatcggctccaacaccgtgaactggatccagcagctgcctggaagagcccccgagctgctgatgtacgacgacgacctgctcgccccaggcgtgtctgatagattcagcggctctagaagcggcaccagcgccagcctgaccatcagcggactgcagtctgaagatgaggccgactactacgccgctacatgggacgatagcctgaacggctgggtgttcggcggcggaacaaaggtgaccgtcctgagcggctaa

SEQ ID NO: 1596 - DNA, 1074 bp, synthetic construct
  source 1..1074: mol_type = other DNA; note = VL12.3-(GS)1-SPOP-NLS nucleic acid
atgggcagccaacctgtgctgacacagagccccagcgtgtccgccgctcctcggcagcgggtgaccatcagcgtgtccggctctaatagcaacatcggctccaacaccgtgaactggatccagcagctgcctggaagagcccccgagctgctgatgtacgacgacgacctgctcgccccaggcgtgtctgatagattcagcggctctagaagcggcaccagcgccagcctgaccatcagcggactgcagtctgaagatgaggccgactactacgccgctacatgggacgatagcctgaacggctgggtgttcggcggcggaacaaaggtgaccgtcctgagcggcggcagcaacgggcttctccctgatgacaagcttaccctcttctgcgaggtgagtgttgtgcaagattctgtcaacatttctggccagaataccatgaacatggtaaaggttcctgagtgccggctggcagatgagttaggaggactgtgggagaattcccggttcacagactgctgcttgtgtgttgccggccaggaattccaggctcacaaggctatcttagcagctcgttctccggtttttagtgccatgtttgaacatgaaatggaggagagcaaaaagaatcgagttgaaatcaatgatgtggagcctgaagtttttaaggaaatgatgtgcttcatttacacggggaaggctccaaacctcgacaaaatggctgatgatttgctggcagctgctgacaagtatgccctggagcgcttaaaggtcatgtgtgaggatgccctctgcagtaacctgtccgtggagaacgctgcagaaattctcatcctggccgacctccacagtgcagatcagttgaaaactcaggcagtggatttcatcaactatcatgcttcggatgtcttggagacctctgggtggaagtcaatggtggtgtcacatccccacttggtggctgaggcataccgctctctggcttcagcacagtgcccttttctgggacccccacgcaaacgcctgaagcaatccggcagcggcagcccggcggcgaaacgcgtgaaactggat

SEQ ID NO: 1597 - DNA, 1080 bp, synthetic construct
  source 1..1080: mol_type = other DNA; note = VL12.3-(GS)2-SPOP-NLS nucleic acid
atgggcagccaacctgtgctgacacagagccccagcgtgtccgccgctcctcggcagcgggtgaccatcagcgtgtccggctctaatagcaacatcggctccaacaccgtgaactggatccagcagctgcctggaagagcccccgagctgctgatgtacgacgacgacctgctcgccccaggcgtgtctgatagattcagcggctctagaagcggcaccagcgccagcctgaccatcagcggactgcagtctgaagatgaggccgactactacgccgctacatgggacgatagcctgaacggctgggtgttcggcggcggaacaaaggtgaccgtcctgagcggcggcagcggcagcaacgggcttctccctgatgacaagcttaccctcttctgcgaggtgagtgttgtgcaagattctgtcaacatttctggccagaataccatgaacatggtaaaggttcctgagtgccggctggcagatgagttaggaggactgtgggagaattcccggttcacagactgctgcttgtgtgttgccggccaggaattccaggctcacaaggctatcttagcagctcgttctccggtttttagtgccatgtttgaacatgaaatggaggagagcaaaaagaatcgagttgaaatcaatgatgtggagcctgaagtttttaaggaaatgatgtgcttcatttacacggggaaggctccaaacctcgacaaaatggctgatgatttgctggcagctgctgacaagtatgccctggagcgcttaaaggtcatgtgtgaggatgccctctgcagtaacctgtccgtggagaacgctgcagaaattctcatcctggccgacctccacagtgcagatcagttgaaaactcaggcagtggatttcatcaactatcatgcttcggatgtcttggagacctctgggtggaagtcaatggtggtgtcacatccccacttggtggctgaggcataccgctctctggcttcagcacagtgcccttttctgggacccccacgcaaacgcctgaagcaatccggcagcggcagcccggcggcgaaacgcgtgaaactggat

SEQ ID NO: 1598 - DNA, 1086 bp, synthetic construct
  source 1..1086: mol_type = other DNA; note = VL12.3-(GS)3-SPOP-NLS nucleic acid
atgggcagccaacctgtgctgacacagagccccagcgtgtccgccgctcctcggcagcgggtgaccatcagcgtgtccggctctaatagcaacatcggctccaacaccgtgaactggatccagcagctgcctggaagagcccccgagctgctgatgtacgacgacgacctgctcgccccaggcgtgtctgatagattcagcggctctagaagcggcaccagcgccagcctgaccatcagcggactgcagtctgaagatgaggccgactactacgccgctacatgggacgatagcctgaacggctgggtgttcggcggcggaacaaaggtgaccgtcctgagcggcggcagcggcagcggcagcaacgggcttctccctgatgacaagcttaccctcttctgcgaggtgagtgttgtgcaagattctgtcaacatttctggccagaataccatgaacatggtaaaggttcctgagtgccggctggcagatgagttaggaggactgtgggagaattcccggttcacagactgctgcttgtgtgttgccggccaggaattccaggctcacaaggctatcttagcagctcgttctccggtttttagtgccatgtttgaacatgaaatggaggagagcaaaaagaatcgagttgaaatcaatgatgtggagcctgaagtttttaaggaaatgatgtgcttcatttacacggggaaggctccaaacctcgacaaaatggctgatgatttgctggcagctgctgacaagtatgccctggagcgcttaaaggtcatgtgtgaggatgccctctgcagtaacctgtccgtggagaacgctgcagaaattctcatcctggccgacctccacagtgcagatcagttgaaaactcaggcagtggatttcatcaactatcatgcttcggatgtcttggagacctctgggtggaagtcaatggtggtgtcacatccccacttggtggctgaggcataccgctctctggcttcagcacagtgcccttttctgggacccccacgcaaacgcctgaagcaatccggcagcggcagcccggcggcgaaacgcgtgaaactggat

SEQ ID NO: 1599 - DNA, 1092 bp, synthetic construct
  source 1..1092: mol_type = other DNA; note = VL12.3-(GS)4-SPOP-NLS nucleic acid
atgggcagccaacctgtgctgacacagagccccagcgtgtccgccgctcctcggcagcgggtgaccatcagcgtgtccggctctaatagcaacatcggctccaacaccgtgaactggatccagcagctgcctggaagagcccccgagctgctgatgtacgacgacgacctgctcgccccaggcgtgtctgatagattcagcggctctagaagcggcaccagcgccagcctgaccatcagcggactgcagtctgaagatgaggccgactactacgccgctacatgggacgatagcctgaacggctgggtgttcggcggcggaacaaaggtgaccgtcctgagcggcggcagcggcagcggcagcggcagcaacgggcttctccctgatgacaagcttaccctcttctgcgaggtgagtgttgtgcaagattctgtcaacatttctggccagaataccatgaacatggtaaaggttcctgagtgccggctggcagatgagttaggaggactgtgggagaattcccggttcacagactgctgcttgtgtgttgccggccaggaattccaggctcacaaggctatcttagcagctcgttctccggtttttagtgccatgtttgaacatgaaatggaggagagcaaaaagaatcgagttgaaatcaatgatgtggagcctgaagtttttaaggaaatgatgtgcttcatttacacggggaaggctccaaacctcgacaaaatggctgatgatttgctggcagctgctgacaagtatgccctggagcgcttaaaggtcatgtgtgaggatgccctctgcagtaacctgtccgtggagaacgctgcagaaattctcatcctggccgacctccacagtgcagatcagttgaaaactcaggcagtggatttcatcaactatcatgcttcggatgtcttggagacctctgggtggaagtcaatggtggtgtcacatccccacttggtggctgaggcataccgctctctggcttcagcacagtgcccttttctgggacccccacgcaaacgcctgaagcaatccggcagcggcagcccggcggcgaaacgcgtgaaactggat

SEQ ID NO: 1600 - DNA, 1098 bp, synthetic construct
  source 1..1098: mol_type = other DNA; note = VL12.3-(GS)5-SPOP-NLS nucleic acid
atgggcagccaacctgtgctgacacagagccccagcgtgtccgccgctcctcggcagcgggtgaccatcagcgtgtccggctctaatagcaacatcggctccaacaccgtgaactggatccagcagctgcctggaagagcccccgagctgctgatgtacgacgacgacctgctcgccccaggcgtgtctgatagattcagcggctctagaagcggcaccagcgccagcctgaccatcagcggactgcagtctgaagatgaggccgactactacgccgctacatgggacgatagcctgaacggctgggtgttcggcggcggaacaaaggtgaccgtcctgagcggcggcagcggcagcggcagcggcagcggcagcaacgggcttctccctgatgacaagcttaccctcttctgcgaggtgagtgttgtgcaagattctgtcaacatttctggccagaataccatgaacatggtaaaggttcctgagtgccggctggcagatgagttaggaggactgtgggagaattcccggttcacagactgctgcttgtgtgttgccggccaggaattccaggctcacaaggctatcttagcagctcgttctccggtttttagtgccatgtttgaacatgaaatggaggagagcaaaaagaatcgagttgaaatcaatgatgtggagcctgaagtttttaaggaaatgatgtgcttcatttacacggggaaggctccaaacctcgacaaaatggctgatgatttgctggcagctgctgacaagtatgccctggagcgcttaaaggtcatgtgtgaggatgccctctgcagtaacctgtccgtggagaacgctgcagaaattctcatcctggccgacctccacagtgcagatcagttgaaaactcaggcagtggatttcatcaactatcatgcttcggatgtcttggagacctctgggtggaagtcaatggtggtgtcacatccccacttggtggctgaggcataccgctctctggcttcagcacagtgcccttttctgggacccccacgcaaacgcctgaagcaatccggcagcggcagcccggcggcgaaacgcgtgaaactggat

SEQ ID NO: 1601 - DNA, 1104 bp, synthetic construct
  source 1..1104: mol_type = other DNA; note = VL12.3-(GS)6-SPOP-NLS nucleic acid
atgggcagccaacctgtgctgacacagagccccagcgtgtccgccgctcctcggcagcgggtgaccatcagcgtgtccggctctaatagcaacatcggctccaacaccgtgaactggatccagcagctgcctggaagagcccccgagctgctgatgtacgacgacgacctgctcgccccaggcgtgtctgatagattcagcggctctagaagcggcaccagcgccagcctgaccatcagcggactgcagtctgaagatgaggccgactactacgccgctacatgggacgatagcctgaacggctgggtgttcggcggcggaacaaaggtgaccgtcctgagcggcggcagcggcagcggcagcggcagcggcagcggcagcaacgggcttctccctgatgacaagcttaccctcttctgcgaggtgagtgttgtgcaagattctgtcaacatttctggccagaataccatgaacatggtaaaggttcctgagtgccggctggcagatgagttaggaggactgtgggagaattcccggttcacagactgctgcttgtgtgttgccggccaggaattccaggctcacaaggctatcttagcagctcgttctccggtttttagtgccatgtttgaacatgaaatggaggagagcaaaaagaatcgagttgaaatcaatgatgtggagcctgaagtttttaaggaaatgatgtgcttcatttacacggggaaggctccaaacctcgacaaaatggctgatgatttgctggcagctgctgacaagtatgccctggagcgcttaaaggtcatgtgtgaggatgccctctgcagtaacctgtccgtggagaacgctgcagaaattctcatcctggccgacctccacagtgcagatcagttgaaaactcaggcagtggatttcatcaactatcatgcttcggatgtcttggagacctctgggtggaagtcaatggtggtgtcacatccccacttggtggctgaggcataccgctctctggcttcagcacagtgcccttttctgggacccccacgcaaacgcctgaagcaatccggcagcggcagcccggcggcgaaacgcgtgaaactggat

SEQ ID NO: 1602 - DNA, 1104 bp, synthetic construct
  source 1..1104: mol_type = other DNA; note = VL12.3-(GS)1-SPOP-NLS-HA nucleic acid
atgggcagccaacctgtgctgacacagagccccagcgtgtccgccgctcctcggcagcgggtgaccatcagcgtgtccggctctaatagcaacatcggctccaacaccgtgaactggatccagcagctgcctggaagagcccccgagctgctgatgtacgacgacgacctgctcgccccaggcgtgtctgatagattcagcggctctagaagcggcaccagcgccagcctgaccatcagcggactgcagtctgaagatgaggccgactactacgccgctacatgggacgatagcctgaacggctgggtgttcggcggcggaacaaaggtgaccgtcctgagcggcggcagcaacgggcttctccctgatgacaagcttaccctcttctgcgaggtgagtgttgtgcaagattctgtcaacatttctggccagaataccatgaacatggtaaaggttcctgagtgccggctggcagatgagttaggaggactgtgggagaattcccggttcacagactgctgcttgtgtgttgccggccaggaattccaggctcacaaggctatcttagcagctcgttctccggtttttagtgccatgtttgaacatgaaatggaggagagcaaaaagaatcgagttgaaatcaatgatgtggagcctgaagtttttaaggaaatgatgtgcttcatttacacggggaaggctccaaacctcgacaaaatggctgatgatttgctggcagctgctgacaagtatgccctggagcgcttaaaggtcatgtgtgaggatgccctctgcagtaacctgtccgtggagaacgctgcagaaattctcatcctggccgacctccacagtgcagatcagttgaaaactcaggcagtggatttcatcaactatcatgcttcggatgtcttggagacctctgggtggaagtcaatggtggtgtcacatccccacttggtggctgaggcataccgctctctggcttcagcacagtgcccttttctgggacccccacgcaaacgcctgaagcaatccggcagcggcagcccggcggcgaaacgcgtgaaactggattacccatacgatgttccagattacgcttaa

SEQ ID NO: 1603 - DNA, 1110 bp, synthetic construct
  source 1..1110: mol_type = other DNA; note = VL12.3-(GS)2-SPOP-NLS-HA nucleic acid
atgggcagccaacctgtgctgacacagagccccagcgtgtccgccgctcctcggcagcgggtgaccatcagcgtgtccggctctaatagcaacatcggctccaacaccgtgaactggatccagcagctgcctggaagagcccccgagctgctgatgtacgacgacgacctgctcgccccaggcgtgtctgatagattcagcggctctagaagcggcaccagcgccagcctgaccatcagcggactgcagtctgaagatgaggccgactactacgccgctacatgggacgatagcctgaacggctgggtgttcggcggcggaacaaaggtgaccgtcctgagcggcggcagcggcagcaacgggcttctccctgatgacaagcttaccctcttctgcgaggtgagtgttgtgcaagattctgtcaacatttctggccagaataccatgaacatggtaaaggttcctgagtgccggctggcagatgagttaggaggactgtgggagaattcccggttcacagactgctgcttgtgtgttgccggccaggaattccaggctcacaaggctatcttagcagctcgttctccggtttttagtgccatgtttgaacatgaaatggaggagagcaaaaagaatcgagttgaaatcaatgatgtggagcctgaagtttttaaggaaatgatgtgcttcatttacacggggaaggctccaaacctcgacaaaatggctgatgatttgctggcagctgctgacaagtatgccctggagcgcttaaaggtcatgtgtgaggatgccctctgcagtaacctgtccgtggagaacgctgcagaaattctcatcctggccgacctccacagtgcagatcagttgaaaactcaggcagtggatttcatcaactatcatgcttcggatgtcttggagacctctgggtggaagtcaatggtggtgtcacatccccacttggtggctgaggcataccgctctctggcttcagcacagtgcccttttctgggacccccacgcaaacgcctgaagcaatccggcagcggcagcccggcggcgaaacgcgtgaaactggattacccatacgatgttccagattacgcttaa

SEQ ID NO: 1604 - DNA, 1116 bp, synthetic construct
  source 1..1116: mol_type = other DNA; note = VL12.3-(GS)3-SPOP-NLS-HA nucleic acid
atgggcagccaacctgtgctgacacagagccccagcgtgtccgccgctcctcggcagcgggtgaccatcagcgtgtccggctctaatagcaacatcggctccaacaccgtgaactggatccagcagctgcctggaagagcccccgagctgctgatgtacgacgacgacctgctcgccccaggcgtgtctgatagattcagcggctctagaagcggcaccagcgccagcctgaccatcagcggactgcagtctgaagatgaggccgactactacgccgctacatgggacgatagcctgaacggctgggtgttcggcggcggaacaaaggtgaccgtcctgagcggcggcagcggcagcggcagcaacgggcttctccctgatgacaagcttaccctcttctgcgaggtgagtgttgtgcaagattctgtcaacatttctggccagaataccatgaacatggtaaaggttcctgagtgccggctggcagatgagttaggaggactgtgggagaattcccggttcacagactgctgcttgtgtgttgccggccaggaattccaggctcacaaggctatcttagcagctcgttctccggtttttagtgccatgtttgaacatgaaatggaggagagcaaaaagaatcgagttgaaatcaatgatgtggagcctgaagtttttaaggaaatgatgtgcttcatttacacggggaaggctccaaacctcgacaaaatggctgatgatttgctggcagctgctgacaagtatgccctggagcgcttaaaggtcatgtgtgaggatgccctctgcagtaacctgtccgtggagaacgctgcagaaattctcatcctggccgacctccacagtgcagatcagttgaaaactcaggcagtggatttcatcaactatcatgcttcggatgtcttggagacctctgggtggaagtcaatggtggtgtcacatccccacttggtggctgaggcataccgctctctggcttcagcacagtgcccttttctgggacccccacgcaaacgcctgaagcaatccggcagcggcagcccggcggcgaaacgcgtgaaactggattacccatacgatgttccagattacgcttaa

SEQ ID NO: 1605 - DNA, 1122 bp, synthetic construct
  source 1..1122: mol_type = other DNA; note = VL12.3-(GS)4-SPOP-NLS-HA nucleic acid
atgggcagccaacctgtgctgacacagagccccagcgtgtccgccgctcctcggcagcgggtgaccatcagcgtgtccggctctaatagcaacatcggctccaacaccgtgaactggatccagcagctgcctggaagagcccccgagctgctgatgtacgacgacgacctgctcgccccaggcgtgtctgatagattcagcggctctagaagcggcaccagcgccagcctgaccatcagcggactgcagtctgaagatgaggccgactactacgccgctacatgggacgatagcctgaacggctgggtgttcggcggcggaacaaaggtgaccgtcctgagcggcggcagcggcagcggcagcggcagcaacgggcttctccctgatgacaagcttaccctcttctgcgaggtgagtgttgtgcaagattctgtcaacatttctggccagaataccatgaacatggtaaaggttcctgagtgccggctggcagatgagttaggaggactgtgggagaattcccggttcacagactgctgcttgtgtgttgccggccaggaattccaggctcacaaggctatcttagcagctcgttctccggtttttagtgccatgtttgaacatgaaatggaggagagcaaaaagaatcgagttgaaatcaatgatgtggagcctgaagtttttaaggaaatgatgtgcttcatttacacggggaaggctccaaacctcgacaaaatggctgatgatttgctggcagctgctgacaagtatgccctggagcgcttaaaggtcatgtgtgaggatgccctctgcagtaacctgtccgtggagaacgctgcagaaattctcatcctggccgacctccacagtgcagatcagttgaaaactcaggcagtggatttcatcaactatcatgcttcggatgtcttggagacctctgggtggaagtcaatggtggtgtcacatccccacttggtggctgaggcataccgctctctggcttcagcacagtgcccttttctgggacccccacgcaaacgcctgaagcaatccggcagcggcagcccggcggcgaaacgcgtgaaactggattacccatacgatgttccagattacgcttaa

SEQ ID NO: 1606 - DNA, 1128 bp, synthetic construct
  source 1..1128: mol_type = other DNA; note = VL12.3-(GS)5-SPOP-NLS-HA nucleic acid
atgggcagccaacctgtgctgacacagagccccagcgtgtccgccgctcctcggcagcgggtgaccatcagcgtgtccggctctaatagcaacatcggctccaacaccgtgaactggatccagcagctgcctggaagagcccccgagctgctgatgtacgacgacgacctgctcgccccaggcgtgtctgatagattcagcggctctagaagcggcaccagcgccagcctgaccatcagcggactgcagtctgaagatgaggccgactactacgccgctacatgggacgatagcctgaacggctgggtgttcggcggcggaacaaaggtgaccgtcctgagcggcggcagcggcagcggcagcggcagcggcagcaacgggcttctccctgatgacaagcttaccctcttctgcgaggtgagtgttgtgcaagattctgtcaacatttctggccagaataccatgaacatggtaaaggttcctgagtgccggctggcagatgagttaggaggactgtgggagaattcccggttcacagactgctgcttgtgtgttgccggccaggaattccaggctcacaaggctatcttagcagctcgttctccggtttttagtgccatgtttgaacatgaaatggaggagagcaaaaagaatcgagttgaaatcaatgatgtggagcctgaagtttttaaggaaatgatgtgcttcatttacacggggaaggctccaaacctcgacaaaatggctgatgatttgctggcagctgctgacaagtatgccctggagcgcttaaaggtcatgtgtgaggatgccctctgcagtaacctgtccgtggagaacgctgcagaaattctcatcctggccgacctccacagtgcagatcagttgaaaactcaggcagtggatttcatcaactatcatgcttcggatgtcttggagacctctgggtggaagtcaatggtggtgtcacatccccacttggtggctgaggcataccgctctctggcttcagcacagtgcccttttctgggacccccacgcaaacgcctgaagcaatccggcagcggcagcccggcggcgaaacgcgtgaaactggattacccatacgatgttccagattacgcttaa

SEQ ID NO: 1607 - DNA, 1134 bp, synthetic construct
  source 1..1134: mol_type = other DNA; note = VL12.3-(GS)6-SPOP-NLS-HA nucleic acid
atgggcagccaacctgtgctgacacagagccccagcgtgtccgccgctcctcggcagcgggtgaccatcagcgtgtccggctctaatagcaacatcggctccaacaccgtgaactggatccagcagctgcctggaagagcccccgagctgctgatgtacgacgacgacctgctcgccccaggcgtgtctgatagattcagcggctctagaagcggcaccagcgccagcctgaccatcagcggactgcagtctgaagatgaggccgactactacgccgctacatgggacgatagcctgaacggctgggtgttcggcggcggaacaaaggtgaccgtcctgagcggcggcagcggcagcggcagcggcagcggcagcggcagcaacgggcttctccctgatgacaagcttaccctcttctgcgaggtgagtgttgtgcaagattctgtcaacatttctggccagaataccatgaacatggtaaaggttcctgagtgccggctggcagatgagttaggaggactgtgggagaattcccggttcacagactgctgcttgtgtgttgccggccaggaattccaggctcacaaggctatcttagcagctcgttctccggtttttagtgccatgtttgaacatgaaatggaggagagcaaaaagaatcgagttgaaatcaatgatgtggagcctgaagtttttaaggaaatgatgtgcttcatttacacggggaaggctccaaacctcgacaaaatggctgatgatttgctggcagctgctgacaagtatgccctggagcgcttaaaggtcatgtgtgaggatgccctctgcagtaacctgtccgtggagaacgctgcagaaattctcatcctggccgacctccacagtgcagatcagttgaaaactcaggcagtggatttcatcaactatcatgcttcggatgtcttggagacctctgggtggaagtcaatggtggtgtcacatccccacttggtggctgaggcataccgctctctggcttcagcacagtgcccttttctgggacccccacgcaaacgcctgaagcaatccggcagcggcagcccggcggcgaaacgcgtgaaactggattacccatacgatgttccagattacgcttaa

SEQ ID NO: 1608 - DNA, 891 bp, synthetic construct
  source 1..891: mol_type = other DNA; note = VL12.3-(GS)1-CHIP nucleic acid
atgggcagccaacctgtgctgacacagagccccagcgtgtccgccgctcctcggcagcgggtgaccatcagcgtgtccggctctaatagcaacatcggctccaacaccgtgaactggatccagcagctgcctggaagagcccccgagctgctgatgtacgacgacgacctgctcgccccaggcgtgtctgatagattcagcggctctagaagcggcaccagcgccagcctgaccatcagcggactgcagtctgaagatgaggccgactactacgccgctacatgggacgatagcctgaacggctgggtgttcggcggcggaacaaaggtgaccgtcctgagcggcggcagccggctgaacttcggggacgacatccccagcgctcttcgaatcgcgaagaagaagcgctggaacagcattgaggagcggcgcatccaccaggagagcgagctgcactcctacctctccaggctcattgccgcggagcgtgagagggagctggaagagtgccagcgaaaccacgagggtgatgaggacgacagccacgtccgggcccagcaggcctgcattgaggccaagcacgacaagtacatggcggacatggacgagcttttttctcaggtggatgagaagaggaagaagcgagacatccccgactacctgtgtggcaagatcagctttgagctgatgcgggagccgtgcatcacgcccagtggcatcacctacgaccgcaaggacatcgaggagcacctgcagcgtgtgggtcattttgacccggtgaccaggagccccctgacccaggaacagctcatccccaacttggctatgaaggaggttattgacgcattcatctctgagaatggctgggtggaggactacggcagcggcagc

SEQ ID NO: 1609 - DNA, 897 bp, synthetic construct
  source 1..897: mol_type = other DNA; note = VL12.3-(GS)2-CHIP nucleic acid
atgggcagccaacctgtgctgacacagagccccagcgtgtccgccgctcctcggcagcgggtgaccatcagcgtgtccggctctaatagcaacatcggctccaacaccgtgaactggatccagcagctgcctggaagagcccccgagctgctgatgtacgacgacgacctgctcgccccaggcgtgtctgatagattcagcggctctagaagcggcaccagcgccagcctgaccatcagcggactgcagtctgaagatgaggccgactactacgccgctacatgggacgatagcctgaacggctgggtgttcggcggcggaacaaaggtgaccgtcctgagcggcggcagcggcagccggctgaacttcggggacgacatccccagcgctcttcgaatcgcgaagaagaagcgctggaacagcattgaggagcggcgcatccaccaggagagcgagctgcactcctacctctccaggctcattgccgcggagcgtgagagggagctggaagagtgccagcgaaaccacgagggtgatgaggacgacagccacgtccgggcccagcaggcctgcattgaggccaagcacgacaagtacatggcggacatggacgagcttttttctcaggtggatgagaagaggaagaagcgagacatccccgactacctgtgtggcaagatcagctttgagctgatgcgggagccgtgcatcacgcccagtggcatcacctacgaccgcaaggacatcgaggagcacctgcagcgtgtgggtcattttgacccggtgaccaggagccccctgacccaggaacagctcatccccaacttggctatgaaggaggttattgacgcattcatctctgagaatggctgggtggaggactacggcagcggcagc

SEQ ID NO: 1610 - DNA, 903 bp, synthetic construct
  source 1..903: mol_type = other DNA; note = VL12.3-(GS)3-CHIP nucleic acid
atgggcagccaacctgtgctgacacagagccccagcgtgtccgccgctcctcggcagcgggtgaccatcagcgtgtccggctctaatagcaacatcggctccaacaccgtgaactggatccagcagctgcctggaagagcccccgagctgctgatgtacgacgacgacctgctcgccccaggcgtgtctgatagattcagcggctctagaagcggcaccagcgccagcctgaccatcagcggactgcagtctgaagatgaggccgactactacgccgctacatgggacgatagcctgaacggctgggtgttcggcggcggaacaaaggtgaccgtcctgagcggcggcagcggcagcggcagccggctgaacttcggggacgacatccccagcgctcttcgaatcgcgaagaagaagcgctggaacagcattgaggagcggcgcatccaccaggagagcgagctgcactcctacctctccaggctcattgccgcggagcgtgagagggagctggaagagtgccagcgaaaccacgagggtgatgaggacgacagccacgtccgggcccagcaggcctgcattgaggccaagcacgacaagtacatggcggacatggacgagcttttttctcaggtggatgagaagaggaagaagcgagacatccccgactacctgtgtggcaagatcagctttgagctgatgcgggagccgtgcatcacgcccagtggcatcacctacgaccgcaaggacatcgaggagcacctgcagcgtgtgggtcattttgacccggtgaccaggagccccctgacccaggaacagctcatccccaacttggctatgaaggaggttattgacgcattcatctctgagaatggctgggtggaggactacggcagcggcagc

SEQ ID NO: 1611 - DNA, 909 bp, synthetic construct
  source 1..909: mol_type = other DNA; note = VL12.3-(GS)4-CHIP nucleic acid
atgggcagccaacctgtgctgacacagagccccagcgtgtccgccgctcctcggcagcgggtgaccatcagcgtgtccggctctaatagcaacatcggctccaacaccgtgaactggatccagcagctgcctggaagagcccccgagctgctgatgtacgacgacgacctgctcgccccaggcgtgtctgatagattcagcggctctagaagcggcaccagcgccagcctgaccatcagcggactgcagtctgaagatgaggccgactactacgccgctacatgggacgatagcctgaacggctgggtgttcggcggcggaacaaaggtgaccgtcctgagcggcggcagcggcagcggcagcggcagccggctgaacttcggggacgacatccccagcgctcttcgaatcgcgaagaagaagcgctggaacagcattgaggagcggcgcatccaccaggagagcgagctgcactcctacctctccaggctcattgccgcggagcgtgagagggagctggaagagtgccagcgaaaccacgagggtgatgaggacgacagccacgtccgggcccagcaggcctgcattgaggccaagcacgacaagtacatggcggacatggacgagcttttttctcaggtggatgagaagaggaagaagcgagacatccccgactacctgtgtggcaagatcagctttgagctgatgcgggagccgtgcatcacgcccagtggcatcacctacgaccgcaaggacatcgaggagcacctgcagcgtgtgggtcattttgacccggtgaccaggagccccctgacccaggaacagctcatccccaacttggctatgaaggaggttattgacgcattcatctctgagaatggctgggtggaggactacggcagcggcagc

SEQ ID NO: 1612 - DNA, 915 bp, synthetic construct
  source 1..915: mol_type = other DNA; note = VL12.3-(GS)5-CHIP nucleic acid
atgggcagccaacctgtgctgacacagagccccagcgtgtccgccgctcctcggcagcgggtgaccatcagcgtgtccggctctaatagcaacatcggctccaacaccgtgaactggatccagcagctgcctggaagagcccccgagctgctgatgtacgacgacgacctgctcgccccaggcgtgtctgatagattcagcggctctagaagcggcaccagcgccagcctgaccatcagcggactgcagtctgaagatgaggccgactactacgccgctacatgggacgatagcctgaacggctgggtgttcggcggcggaacaaaggtgaccgtcctgagcggcggcagcggcagcggcagcggcagcggcagccggctgaacttcggggacgacatccccagcgctcttcgaatcgcgaagaagaagcgctggaacagcattgaggagcggcgcatccaccaggagagcgagctgcactcctacctctccaggctcattgccgcggagcgtgagagggagctggaagagtgccagcgaaaccacgagggtgatgaggacgacagccacgtccgggcccagcaggcctgcattgaggccaagcacgacaagtacatggcggacatggacgagcttttttctcaggtggatgagaagaggaagaagcgagacatccccgactacctgtgtggcaagatcagctttgagctgatgcgggagccgtgcatcacgcccagtggcatcacctacgaccgcaaggacatcgaggagcacctgcagcgtgtgggtcattttgacccggtgaccaggagccccctgacccaggaacagctcatccccaacttggctatgaaggaggttattgacgcattcatctctgagaatggctgggtggaggactacggcagcggcagc

SEQ ID NO: 1613 - DNA, 921 bp, synthetic construct
  source 1..921: mol_type = other DNA; note = VL12.3-(GS)6-CHIP nucleic acid
atgggcagccaacctgtgctgacacagagccccagcgtgtccgccgctcctcggcagcgggtgaccatcagcgtgtccggctctaatagcaacatcggctccaacaccgtgaactggatccagcagctgcctggaagagcccccgagctgctgatgtacgacgacgacctgctcgccccaggcgtgtctgatagattcagcggctctagaagcggcaccagcgccagcctgaccatcagcggactgcagtctgaagatgaggccgactactacgccgctacatgggacgatagcctgaacggctgggtgttcggcggcggaacaaaggtgaccgtcctgagcggcggcagcggcagcggcagcggcagcggcagcggcagccggctgaacttcggggacgacatccccagcgctcttcgaatcgcgaagaagaagcgctggaacagcattgaggagcggcgcatccaccaggagagcgagctgcactcctacctctccaggctcattgccgcggagcgtgagagggagctggaagagtgccagcgaaaccacgagggtgatgaggacgacagccacgtccgggcccagcaggcctgcattgaggccaagcacgacaagtacatggcggacatggacgagcttttttctcaggtggatgagaagaggaagaagcgagacatccccgactacctgtgtggcaagatcagctttgagctgatgcgggagccgtgcatcacgcccagtggcatcacctacgaccgcaaggacatcgaggagcacctgcagcgtgtgggtcattttgacccggtgaccaggagccccctgacccaggaacagctcatccccaacttggctatgaaggaggttattgacgcattcatctctgagaatggctgggtggaggactacggcagcggcagc

SEQ ID NO: 1614 - DNA, 921 bp, synthetic construct
  source 1..921: mol_type = other DNA; note = VL12.3-(GS)1-CHIP-HA nucleic acid
atgggcagccaacctgtgctgacacagagccccagcgtgtccgccgctcctcggcagcgggtgaccatcagcgtgtccggctctaatagcaacatcggctccaacaccgtgaactggatccagcagctgcctggaagagcccccgagctgctgatgtacgacgacgacctgctcgccccaggcgtgtctgatagattcagcggctctagaagcggcaccagcgccagcctgaccatcagcggactgcagtctgaagatgaggccgactactacgccgctacatgggacgatagcctgaacggctgggtgttcggcggcggaacaaaggtgaccgtcctgagcggcggcagccggctgaacttcggggacgacatccccagcgctcttcgaatcgcgaagaagaagcgctggaacagcattgaggagcggcgcatccaccaggagagcgagctgcactcctacctctccaggctcattgccgcggagcgtgagagggagctggaagagtgccagcgaaaccacgagggtgatgaggacgacagccacgtccgggcccagcaggcctgcattgaggccaagcacgacaagtacatggcggacatggacgagcttttttctcaggtggatgagaagaggaagaagcgagacatccccgactacctgtgtggcaagatcagctttgagctgatgcgggagccgtgcatcacgcccagtggcatcacctacgaccgcaaggacatcgaggagcacctgcagcgtgtgggtcattttgacccggtgaccaggagccccctgacccaggaacagctcatccccaacttggctatgaaggaggttattgacgcattcatctctgagaatggctgggtggaggactacggcagcggcagctacccatacgatgttccagattacgcttaa

SEQ ID NO: 1615 - DNA, 927 bp, synthetic construct
  source 1..927: mol_type = other DNA; note = VL12.3-(GS)2-CHIP-HA nucleic acid
atgggcagccaacctgtgctgacacagagccccagcgtgtccgccgctcctcggcagcgggtgaccatcagcgtgtccggctctaatagcaacatcggctccaacaccgtgaactggatccagcagctgcctggaagagcccccgagctgctgatgtacgacgacgacctgctcgccccaggcgtgtctgatagattcagcggctctagaagcggcaccagcgccagcctgaccatcagcggactgcagtctgaagatgaggccgactactacgccgctacatgggacgatagcctgaacggctgggtgttcggcggcggaacaaaggtgaccgtcctgagcggcggcagcggcagccggctgaacttcggggacgacatccccagcgctcttcgaatcgcgaagaagaagcgctggaacagcattgaggagcggcgcatccaccaggagagcgagctgcactcctacctctccaggctcattgccgcggagcgtgagagggagctggaagagtgccagcgaaaccacgagggtgatgaggacgacagccacgtccgggcccagcaggcctgcattgaggccaagcacgacaagtacatggcggacatggacgagcttttttctcaggtggatgagaagaggaagaagcgagacatccccgactacctgtgtggcaagatcagctttgagctgatgcgggagccgtgcatcacgcccagtggcatcacctacgaccgcaaggacatcgaggagcacctgcagcgtgtgggtcattttgacccggtgaccaggagccccctgacccaggaacagctcatccccaacttggctatgaaggaggttattgacgcattcatctctgagaatggctgggtggaggactacggcagcggcagctacccatacgatgttccagattacgcttaa

SEQ ID NO: 1616 - DNA, 933 bp, synthetic construct
  source 1..933: mol_type = other DNA; note = VL12.3-(GS)3-CHIP-HA nucleic acid
atgggcagccaacctgtgctgacacagagccccagcgtgtccgccgctcctcggcagcgggtgaccatcagcgtgtccggctctaatagcaacatcggctccaacaccgtgaactggatccagcagctgcctggaagagcccccgagctgctgatgtacgacgacgacctgctcgccccaggcgtgtctgatagattcagcggctctagaagcggcaccagcgccagcctgaccatcagcggactgcagtctgaagatgaggccgactactacgccgctacatgggacgatagcctgaacggctgggtgttcggcggcggaacaaaggtgaccgtcctgagcggcggcagcggcagcggcagccggctgaacttcggggacgacatccccagcgctcttcgaatcgcgaagaagaagcgctggaacagcattgaggagcggcgcatccaccaggagagcgagctgcactcctacctctccaggctcattgccgcggagcgtgagagggagctggaagagtgccagcgaaaccacgagggtgatgaggacgacagccacgtccgggcccagcaggcctgcattgaggccaagcacgacaagtacatggcggacatggacgagcttttttctcaggtggatgagaagaggaagaagcgagacatccccgactacctgtgtggcaagatcagctttgagctgatgcgggagccgtgcatcacgcccagtggcatcacctacgaccgcaaggacatcgaggagcacctgcagcgtgtgggtcattttgacccggtgaccaggagccccctgacccaggaacagctcatccccaacttggctatgaaggaggttattgacgcattcatctctgagaatggctgggtggaggactacggcagcggcagctacccatacgatgttccagattacgcttaa

SEQ ID NO: 1617 - DNA, 939 bp, synthetic construct
  source 1..939: mol_type = other DNA; note = VL12.3-(GS)4-CHIP-HA nucleic acid
atgggcagccaacctgtgctgacacagagccccagcgtgtccgccgctcctcggcagcgggtgaccatcagcgtgtccggctctaatagcaacatcggctccaacaccgtgaactggatccagcagctgcctggaagagcccccgagctgctgatgtacgacgacgacctgctcgccccaggcgtgtctgatagattcagcggctctagaagcggcaccagcgccagcctgaccatcagcggactgcagtctgaagatgaggccgactactacgccgctacatgggacgatagcctgaacggctgggtgttcggcggcggaacaaaggtgaccgtcctgagcggcggcagcggcagcggcagcggcagccggctgaacttcggggacgacatccccagcgctcttcgaatcgcgaagaagaagcgctggaacagcattgaggagcggcgcatccaccaggagagcgagctgcactcctacctctccaggctcattgccgcggagcgtgagagggagctggaagagtgccagcgaaaccacgagggtgatgaggacgacagccacgtccgggcccagcaggcctgcattgaggccaagcacgacaagtacatggcggacatggacgagcttttttctcaggtggatgagaagaggaagaagcgagacatccccgactacctgtgtggcaagatcagctttgagctgatgcgggagccgtgcatcacgcccagtggcatcacctacgaccgcaaggacatcgaggagcacctgcagcgtgtgggtcattttgacccggtgaccaggagccccctgacccaggaacagctcatccccaacttggctatgaaggaggttattgacgcattcatctctgagaatggctgggtggaggactacggcagcggcagctacccatacgatgttccagattacgcttaa

SEQ ID NO: 1618 - DNA, 945 bp, synthetic construct
  source 1..945: mol_type = other DNA; note = VL12.3-(GS)5-CHIP-HA nucleic acid
atgggcagccaacctgtgctgacacagagccccagcgtgtccgccgctcctcggcagcgggtgaccatcagcgtgtccggctctaatagcaacatcggctccaacaccgtgaactggatccagcagctgcctggaagagcccccgagctgctgatgtacgacgacgacctgctcgccccaggcgtgtctgatagattcagcggctctagaagcggcaccagcgccagcctgaccatcagcggactgcagtctgaagatgaggccgactactacgccgctacatgggacgatagcctgaacggctgggtgttcggcggcggaacaaaggtgaccgtcctgagcggcggcagcggcagcggcagcggcagcggcagccggctgaacttcggggacgacatccccagcgctcttcgaatcgcgaagaagaagcgctggaacagcattgaggagcggcgcatccaccaggagagcgagctgcactcctacctctccaggctcattgccgcggagcgtgagagggagctggaagagtgccagcgaaaccacgagggtgatgaggacgacagccacgtccgggcccagcaggcctgcattgaggccaagcacgacaagtacatggcggacatggacgagcttttttctcaggtggatgagaagaggaagaagcgagacatccccgactacctgtgtggcaagatcagctttgagctgatgcgggagccgtgcatcacgcccagtggcatcacctacgaccgcaaggacatcgaggagcacctgcagcgtgtgggtcattttgacccggtgaccaggagccccctgacccaggaacagctcatccccaacttggctatgaaggaggttattgacgcattcatctctgagaatggctgggtggaggactacggcagcggcagctacccatacgatgttccagattacgcttaa

SEQ ID NO: 1619 - DNA, 951 bp, synthetic construct
  source 1..951: mol_type = other DNA; note = VL12.3-(GS)6-CHIP-HA nucleic acid
atgggcagccaacctgtgctgacacagagccccagcgtgtccgccgctcctcggcagcgggtgaccatcagcgtgtccggctctaatagcaacatcggctccaacaccgtgaactggatccagcagctgcctggaagagcccccgagctgctgatgtacgacgacgacctgctcgccccaggcgtgtctgatagattcagcggctctagaagcggcaccagcgccagcctgaccatcagcggactgcagtctgaagatgaggccgactactacgccgctacatgggacgatagcctgaacggctgggtgttcggcggcggaacaaaggtgaccgtcctgagcggcggcagcggcagcggcagcggcagcggcagcggcagccggctgaacttcggggacgacatccccagcgctcttcgaatcgcgaagaagaagcgctggaacagcattgaggagcggcgcatccaccaggagagcgagctgcactcctacctctccaggctcattgccgcggagcgtgagagggagctggaagagtgccagcgaaaccacgagggtgatgaggacgacagccacgtccgggcccagcaggcctgcattgaggccaagcacgacaagtacatggcggacatggacgagcttttttctcaggtggatgagaagaggaagaagcgagacatccccgactacctgtgtggcaagatcagctttgagctgatgcgggagccgtgcatcacgcccagtggcatcacctacgaccgcaaggacatcgaggagcacctgcagcgtgtgggtcattttgacccggtgaccaggagccccctgacccaggaacagctcatccccaacttggctatgaaggaggttattgacgcattcatctctgagaatggctgggtggaggactacggcagcggcagctacccatacgatgttccagattacgcttaa

SEQ ID NO: 1620 - DNA, 456 bp, synthetic construct
  source 1..456: mol_type = other DNA; note = DCAF1-(GS)1-VL12.3 nucleic acid
caggcgccgattaactttaccagccgcctgaaccgccgcgcgagctttccgaaatatggcggcgtggatggcggctgctttgatcgccatctgatttttagccgcggcagcggcagccaacctgtgctgacacagagccccagcgtgtccgccgctcctcggcagcgggtgaccatcagcgtgtccggctctaatagcaacatcggctccaacaccgtgaactggatccagcagctgcctggaagagcccccgagctgctgatgtacgacgacgacctgctcgccccaggcgtgtctgatagattcagcggctctagaagcggcaccagcgccagcctgaccatcagcggactgcagtctgaagatgaggccgactactacgccgctacatgggacgatagcctgaacggctgggtgttcggcggcggaacaaaggtgaccgtcctgagcggctaa

SEQ ID NO: 1621 - DNA, 462 bp, synthetic construct
  source 1..462: mol_type = other DNA; note = DCAF1-(GS)2-VL12.3 nucleic acid
caggcgccgattaactttaccagccgcctgaaccgccgcgcgagctttccgaaatatggcggcgtggatggcggctgctttgatcgccatctgatttttagccgcggcagcggcagcggcagccaacctgtgctgacacagagccccagcgtgtccgccgctcctcggcagcgggtgaccatcagcgtgtccggctctaatagcaacatcggctccaacaccgtgaactggatccagcagctgcctggaagagcccccgagctgctgatgtacgacgacgacctgctcgccccaggcgtgtctgatagattcagcggctctagaagcggcaccagcgccagcctgaccatcagcggactgcagtctgaagatgaggccgactactacgccgctacatgggacgatagcctgaacggctgggtgttcggcggcggaacaaaggtgaccgtcctgagcggctaa

SEQ ID NO: 1622 - DNA, 468 bp, synthetic construct
  source 1..468: mol_type = other DNA; note = DCAF1-(GS)3-VL12.3 nucleic acid
caggcgccgattaactttaccagccgcctgaaccgccgcgcgagctttccgaaatatggcggcgtggatggcggctgctttgatcgccatctgatttttagccgcggcagcggcagcggcagcggcagccaacctgtgctgacacagagccccagcgtgtccgccgctcctcggcagcgggtgaccatcagcgtgtccggctctaatagcaacatcggctccaacaccgtgaactggatccagcagctgcctggaagagcccccgagctgctgatgtacgacgacgacctgctcgccccaggcgtgtctgatagattcagcggctctagaagcggcaccagcgccagcctgaccatcagcggactgcagtctgaagatgaggccgactactacgccgctacatgggacgatagcctgaacggctgggtgttcggcggcggaacaaaggtgaccgtcctgagcggctaa

SEQ ID NO: 1623 - DNA, 474 bp, synthetic construct
  source 1..474: mol_type = other DNA; note = DCAF1-(GS)4-VL12.3 nucleic acid
caggcgccgattaactttaccagccgcctgaaccgccgcgcgagctttccgaaatatggcggcgtggatggcggctgctttgatcgccatctgatttttagccgcggcagcggcagcggcagcggcagcggcagccaacctgtgctgacacagagccccagcgtgtccgccgctcctcggcagcgggtgaccatcagcgtgtccggctctaatagcaacatcggctccaacaccgtgaactggatccagcagctgcctggaagagcccccgagctgctgatgtacgacgacgacctgctcgccccaggcgtgtctgatagattcagcggctctagaagcggcaccagcgccagcctgaccatcagcggactgcagtctgaagatgaggccgactactacgccgctacatgggacgatagcctgaacggctgggtgttcggcggcggaacaaaggtgaccgtcctgagcggctaa

SEQ ID NO: 1624 - DNA, 480 bp, synthetic construct
  source 1..480: mol_type = other DNA; note = DCAF1-(GS)5-VL12.3 nucleic acid
caggcgccgattaactttaccagccgcctgaaccgccgcgcgagctttccgaaatatggcggcgtggatggcggctgctttgatcgccatctgatttttagccgcggcagcggcagcggcagcggcagcggcagcggcagccaacctgtgctgacacagagccccagcgtgtccgccgctcctcggcagcgggtgaccatcagcgtgtccggctctaatagcaacatcggctccaacaccgtgaactggatccagcagctgcctggaagagcccccgagctgctgatgtacgacgacgacctgctcgccccaggcgtgtctgatagattcagcggctctagaagcggcaccagcgccagcctgaccatcagcggactgcagtctgaagatgaggccgactactacgccgctacatgggacgatagcctgaacggctgggtgttcggcggcggaacaaaggtgaccgtcctgagcggctaa

SEQ ID NO: 1625 - DNA, 486 bp, synthetic construct
  source 1..486: mol_type = other DNA; note = DCAF1-(GS)6-VL12.3 nucleic acid
caggcgccgattaactttaccagccgcctgaaccgccgcgcgagctttccgaaatatggcggcgtggatggcggctgctttgatcgccatctgatttttagccgcggcagcggcagcggcagcggcagcggcagcggcagcggcagccaacctgtgctgacacagagccccagcgtgtccgccgctcctcggcagcgggtgaccatcagcgtgtccggctctaatagcaacatcggctccaacaccgtgaactggatccagcagctgcctggaagagcccccgagctgctgatgtacgacgacgacctgctcgccccaggcgtgtctgatagattcagcggctctagaagcggcaccagcgccagcctgaccatcagcggactgcagtctgaagatgaggccgactactacgccgctacatgggacgatagcctgaacggctgggtgttcggcggcggaacaaaggtgaccgtcctgagcggctaa

SEQ ID NO: 1626 - DNA, 504 bp, synthetic construct
  source 1..504: mol_type = other DNA; note = HA-DCAF1-(GS)1-VL12.3 nucleic acid
atgtacccatacgatgttccagattacgctggcagcggcagcggcagccaggcgccgattaactttaccagccgcctgaaccgccgcgcgagctttccgaaatatggcggcgtggatggcggctgctttgatcgccatctgatttttagccgcggcagcggcagccaacctgtgctgacacagagccccagcgtgtccgccgctcctcggcagcgggtgaccatcagcgtgtccggctctaatagcaacatcggctccaacaccgtgaactggatccagcagctgcctggaagagcccccgagctgctgatgtacgacgacgacctgctcgccccaggcgtgtctgatagattcagcggctctagaagcggcaccagcgccagcctgaccatcagcggactgcagtctgaagatgaggccgactactacgccgctacatgggacgatagcctgaacggctgggtgttcggcggcggaacaaaggtgaccgtcctgagcggctaa

SEQ ID NO: 1627 - DNA, 510 bp, synthetic construct
  source 1..510: mol_type = other DNA; note = HA-DCAF1-(GS)2-VL12.3 nucleic acid
atgtacccatacgatgttccagattacgctggcagcggcagcggcagccaggcgccgattaactttaccagccgcctgaaccgccgcgcgagctttccgaaatatggcggcgtggatggcggctgctttgatcgccatctgatttttagccgcggcagcggcagcggcagccaacctgtgctgacacagagccccagcgtgtccgccgctcctcggcagcgggtgaccatcagcgtgtccggctctaatagcaacatcggctccaacaccgtgaactggatccagcagctgcctggaagagcccccgagctgctgatgtacgacgacgacctgctcgccccaggcgtgtctgatagattcagcggctctagaagcggcaccagcgccagcctgaccatcagcggactgcagtctgaagatgaggccgactactacgccgctacatgggacgatagcctgaacggctgggtgttcggcggcggaacaaaggtgaccgtcctgagcggctaa

SEQ ID NO: 1628 - DNA, 516 bp, synthetic construct
  source 1..516: mol_type = other DNA; note = HA-DCAF1-(GS)3-VL12.3 nucleic acid
atgtacccatacgatgttccagattacgctggcagcggcagcggcagccaggcgccgattaactttaccagccgcctgaaccgccgcgcgagctttccgaaatatggcggcgtggatggcggctgctttgatcgccatctgatttttagccgcggcagcggcagcggcagcggcagccaacctgtgctgacacagagccccagcgtgtccgccgctcctcggcagcgggtgaccatcagcgtgtccggctctaatagcaacatcggctccaacaccgtgaactggatccagcagctgcctggaagagcccccgagctgctgatgtacgacgacgacctgctcgccccaggcgtgtctgatagattcagcggctctagaagcggcaccagcgccagcctgaccatcagcggactgcagtctgaagatgaggccgactactacgccgctacatgggacgatagcctgaacggctgggtgttcggcggcggaacaaaggtgaccgtcctgagcggctaa

SEQ ID NO: 1629 - DNA, 522 bp, synthetic construct
  source 1..522: mol_type = other DNA; note = HA-DCAF1-(GS)4-VL12.3 nucleic acid
atgtacccatacgatgttccagattacgctggcagcggcagcggcagccaggcgccgattaactttaccagccgcctgaaccgccgcgcgagctttccgaaatatggcggcgtggatggcggctgctttgatcgccatctgatttttagccgcggcagcggcagcggcagcggcagcggcagccaacctgtgctgacacagagccccagcgtgtccgccgctcctcggcagcgggtgaccatcagcgtgtccggctctaatagcaacatcggctccaacaccgtgaactggatccagcagctgcctggaagagcccccgagctgctgatgtacgacgacgacctgctcgccccaggcgtgtctgatagattcagcggctctagaagcggcaccagcgccagcctgaccatcagcggactgcagtctgaagatgaggccgactactacgccgctacatgggacgatagcctgaacggctgggtgttcggcggcggaacaaaggtgaccgtcctgagcggctaa

SEQ ID NO: 1630 - DNA, 528 bp, synthetic construct
  source 1..528: mol_type = other DNA; note = HA-DCAF1-(GS)5-VL12.3 nucleic acid
atgtacccatacgatgttccagattacgctggcagcggcagcggcagccaggcgccgattaactttaccagccgcctgaaccgccgcgcgagctttccgaaatatggcggcgtggatggcggctgctttgatcgccatctgatttttagccgcggcagcggcagcggcagcggcagcggcagcggcagccaacctgtgctgacacagagccccagcgtgtccgccgctcctcggcagcgggtgaccatcagcgtgtccggctctaatagcaacatcggctccaacaccgtgaactggatccagcagctgcctggaagagcccccgagctgctgatgtacgacgacgacctgctcgccccaggcgtgtctgatagattcagcggctctagaagcggcaccagcgccagcctgaccatcagcggactgcagtctgaagatgaggccgactactacgccgctacatgggacgatagcctgaacggctgggtgttcggcggcggaacaaaggtgaccgtcctgagcggctaa

SEQ ID NO: 1631 - DNA, 534 bp, synthetic construct
  source 1..534: mol_type = other DNA; note = HA-DCAF1-(GS)6-VL12.3 nucleic acid
atgtacccatacgatgttccagattacgctggcagcggcagcggcagccaggcgccgattaactttaccagccgcctgaaccgccgcgcgagctttccgaaatatggcggcgtggatggcggctgctttgatcgccatctgatttttagccgcggcagcggcagcggcagcggcagcggcagcggcagcggcagccaacctgtgctgacacagagccccagcgtgtccgccgctcctcggcagcgggtgaccatcagcgtgtccggctctaatagcaacatcggctccaacaccgtgaactggatccagcagctgcctggaagagcccccgagctgctgatgtacgacgacgacctgctcgccccaggcgtgtctgatagattcagcggctctagaagcggcaccagcgccagcctgaccatcagcggactgcagtctgaagatgaggccgactactacgccgctacatgggacgatagcctgaacggctgggtgttcggcggcggaacaaaggtgaccgtcctgagcggctaa

SEQ ID NO: 1632 - DNA, 1419 bp, synthetic construct
  source 1..1419: mol_type = other DNA; note = VL12.3-(GS)1-E6AP nucleic acid
ggcagccaacctgtgctgacacagagccccagcgtgtccgccgctcctcggcagcgggtgaccatcagcgtgtccggctctaatagcaacatcggctccaacaccgtgaactggatccagcagctgcctggaagagcccccgagctgctgatgtacgacgacgacctgctcgccccaggcgtgtctgatagattcagcggctctagaagcggcaccagcgccagcctgaccatcagcggactgcagtctgaagatgaggccgactactacgccgctacatgggacgatagcctgaacggctgggtgttcggcggcggaacaaaggtgaccgtcctgagcggcggcagcaatccatatttgagactcaaagttagacgtgaccatatcatagatgatgcacttgtccggctagagatgatcgctatggaaaatcctgcagacttgaagaagcagttgtatgtggaatttgaaggagaacaaggagttgatgagggaggtgtttccaaagaattttttcagctggttgtggaggaaatcttcaatccagatattggtatgttcacatacgatgaatctacaaaattgttttggtttaatccatcttcttttgaaactgagggtcagtttactctgattggcatagtactgggtctggctatttacaataactgtatactggatgtacattttcccatggttgtctacaggaagctaatggggaaaaaaggaacttttcgtgacttgggagactctcacccagttctatatcagagtttaaaagatttattggagtatgaagggaatgtggaagatgacatgatgatcactttccagatatcacagacagatctttttggtaacccaatgatgtatgatctaaaggaaaatggtgataaaattccaattacaaatgaaaacaggaaggaatttgtcaatctttattctgactacattctcaataaatcagtagaaaaacagttcaaggcttttcggagaggttttcatatggtgaccaatgaatctcccttaaagtacttattcagaccagaagaaattgaattgcttatatgtggaagccggaatctagatttccaagcactagaagaaactacagaatatgacggtggctataccagggactctgttctgattagggagttctgggaaatcgttcattcatttacagatgaacagaaaagactcttcttgcagtttacaacgggcacagacagagcacctgtgggaggactaggaaaattaaagatgattatagccaaaaatggcccagacacagaaaggttacctacatctcatacttgctttaatgtgcttttacttccggaatactcaagcaaagaaaaacttaaagagagattgttgaaggccatcacgtatgccaaaggatttggcatgctgtaa

SEQ ID NO: 1633 - DNA, 1425 bp, synthetic construct
  source 1..1425: mol_type = other DNA; note = VL12.3-(GS)2-E6AP nucleic acid
ggcagccaacctgtgctgacacagagccccagcgtgtccgccgctcctcggcagcgggtgaccatcagcgtgtccggctctaatagcaacatcggctccaacaccgtgaactggatccagcagctgcctggaagagcccccgagctgctgatgtacgacgacgacctgctcgccccaggcgtgtctgatagattcagcggctctagaagcggcaccagcgccagcctgaccatcagcggactgcagtctgaagatgaggccgactactacgccgctacatgggacgatagcctgaacggctgggtgttcggcggcggaacaaaggtgaccgtcctgagcggcggcagcggcagcaatccatatttgagactcaaagttagacgtgaccatatcatagatgatgcacttgtccggctagagatgatcgctatggaaaatcctgcagacttgaagaagcagttgtatgtggaatttgaaggagaacaaggagttgatgagggaggtgtttccaaagaattttttcagctggttgtggaggaaatcttcaatccagatattggtatgttcacatacgatgaatctacaaaattgttttggtttaatccatcttcttttgaaactgagggtcagtttactctgattggcatagtactgggtctggctatttacaataactgtatactggatgtacattttcccatggttgtctacaggaagctaatggggaaaaaaggaacttttcgtgacttgggagactctcacccagttctatatcagagtttaaaagatttattggagtatgaagggaatgtggaagatgacatgatgatcactttccagatatcacagacagatctttttggtaacccaatgatgtatgatctaaaggaaaatggtgataaaattccaattacaaatgaaaacaggaaggaatttgtcaatctttattctgactacattctcaataaatcagtagaaaaacagttcaaggcttttcggagaggttttcatatggtgaccaatgaatctcccttaaagtacttattcagaccagaagaaattgaattgcttatatgtggaagccggaatctagatttccaagcactagaagaaactacagaatatgacggtggctataccagggactctgttctgattagggagttctgggaaatcgttcattcatttacagatgaacagaaaagactcttcttgcagtttacaacgggcacagacagagcacctgtgggaggactaggaaaattaaagatgattatagccaaaaatggcccagacacagaaaggttacctacatctcatacttgctttaatgtgcttttacttccggaatactcaagcaaagaaaaacttaaagagagattgttgaaggccatcacgtatgccaaaggatttggcatgctgtaa

SEQ ID NO: 1634 - DNA, 1431 bp, synthetic construct
  source 1..1431: mol_type = other DNA; note = VL12.3-(GS)3-E6AP nucleic acid
ggcagccaacctgtgctgacacagagccccagcgtgtccgccgctcctcggcagcgggtgaccatcagcgtgtccggctctaatagcaacatcggctccaacaccgtgaactggatccagcagctgcctggaagagcccccgagctgctgatgtacgacgacgacctgctcgccccaggcgtgtctgatagattcagcggctctagaagcggcaccagcgccagcctgaccatcagcggactgcagtctgaagatgaggccgactactacgccgctacatgggacgatagcctgaacggctgggtgttcggcggcggaacaaaggtgaccgtcctgagcggcggcagcggcagcggcagcaatccatatttgagactcaaagttagacgtgaccatatcatagatgatgcacttgtccggctagagatgatcgctatggaaaatcctgcagacttgaagaagcagttgtatgtggaatttgaaggagaacaaggagttgatgagggaggtgtttccaaagaattttttcagctggttgtggaggaaatcttcaatccagatattggtatgttcacatacgatgaatctacaaaattgttttggtttaatccatcttcttttgaaactgagggtcagtttactctgattggcatagtactgggtctggctatttacaataactgtatactggatgtacattttcccatggttgtctacaggaagctaatggggaaaaaaggaacttttcgtgacttgggagactctcacccagttctatatcagagtttaaaagatttattggagtatgaagggaatgtggaagatgacatgatgatcactttccagatatcacagacagatctttttggtaacccaatgatgtatgatctaaaggaaaatggtgataaaattccaattacaaatgaaaacaggaaggaatttgtcaatctttattctgactacattctcaataaatcagtagaaaaacagttcaaggcttttcggagaggttttcatatggtgaccaatgaatctcccttaaagtacttattcagaccagaagaaattgaattgcttatatgtggaagccggaatctagatttccaagcactagaagaaactacagaatatgacggtggctataccagggactctgttctgattagggagttctgggaaatcgttcattcatttacagatgaacagaaaagactcttcttgcagtttacaacgggcacagacagagcacctgtgggaggactaggaaaattaaagatgattatagccaaaaatggcccagacacagaaaggttacctacatctcatacttgctttaatgtgcttttacttccggaatactcaagcaaagaaaaacttaaagagagattgttgaaggccatcacgtatgccaaaggatttggcatgctgtaa

SEQ ID NO: 1635 - DNA, 1437 bp, synthetic construct
  source 1..1437: mol_type = other DNA; note = VL12.3-(GS)4-E6AP nucleic acid
ggcagccaacctgtgctgacacagagccccagcgtgtccgccgctcctcggcagcgggtgaccatcagcgtgtccggctctaatagcaacatcggctccaacaccgtgaactggatccagcagctgcctggaagagcccccgagctgctgatgtacgacgacgacctgctcgccccaggcgtgtctgatagattcagcggctctagaagcggcaccagcgccagcctgaccatcagcggactgcagtctgaagatgaggccgactactacgccgctacatgggacgatagcctgaacggctgggtgttcggcggcggaacaaaggtgaccgtcctgagcggcggcagcggcagcggcagcggcagcaatccatatttgagactcaaagttagacgtgaccatatcatagatgatgcacttgtccggctagagatgatcgctatggaaaatcctgcagacttgaagaagcagttgtatgtggaatttgaaggagaacaaggagttgatgagggaggtgtttccaaagaattttttcagctggttgtggaggaaatcttcaatccagatattggtatgttcacatacgatgaatctacaaaattgttttggtttaatccatcttcttttgaaactgagggtcagtttactctgattggcatagtactgggtctggctatttacaataactgtatactggatgtacattttcccatggttgtctacaggaagctaatggggaaaaaaggaacttttcgtgacttgggagactctcacccagttctatatcagagtttaaaagatttattggagtatgaagggaatgtggaagatgacatgatgatcactttccagatatcacagacagatctttttggtaacccaatgatgtatgatctaaaggaaaatggtgataaaattccaattacaaatgaaaacaggaaggaatttgtcaatctttattctgactacattctcaataaatcagtagaaaaacagttcaaggcttttcggagaggttttcatatggtgaccaatgaatctcccttaaagtacttattcagaccagaagaaattgaattgcttatatgtggaagccggaatctagatttccaagcactagaagaaactacagaatatgacggtggctataccagggactctgttctgattagggagttctgggaaatcgttcattcatttacagatgaacagaaaagactcttcttgcagtttacaacgggcacagacagagcacctgtgggaggactaggaaaattaaagatgattatagccaaaaatggcccagacacagaaaggttacctacatctcatacttgctttaatgtgcttttacttccggaatactcaagcaaagaaaaacttaaagagagattgttgaaggccatcacgtatgccaaaggatttggcatgctgtaa

SEQ ID NO: 1636 - DNA, 1443 bp, synthetic construct
  source 1..1443: mol_type = other DNA; note = VL12.3-(GS)5-E6AP nucleic acid
ggcagccaacctgtgctgacacagagccccagcgtgtccgccgctcctcggcagcgggtgaccatcagcgtgtccggctctaatagcaacatcggctccaacaccgtgaactggatccagcagctgcctggaagagcccccgagctgctgatgtacgacgacgacctgctcgccccaggcgtgtctgatagattcagcggctctagaagcggcaccagcgccagcctgaccatcagcggactgcagtctgaagatgaggccgactactacgccgctacatgggacgatagcctgaacggctgggtgttcggcggcggaacaaaggtgaccgtcctgagcggcggcagcggcagcggcagcggcagcggcagcaatccatatttgagactcaaagttagacgtgaccatatcatagatgatgcacttgtccggctagagatgatcgctatggaaaatcctgcagacttgaagaagcagttgtatgtggaatttgaaggagaacaaggagttgatgagggaggtgtttccaaagaattttttcagctggttgtggaggaaatcttcaatccagatattggtatgttcacatacgatgaatctacaaaattgttttggtttaatccatcttcttttgaaactgagggtcagtttactctgattggcatagtactgggtctggctatttacaataactgtatactggatgtacattttcccatggttgtctacaggaagctaatggggaaaaaaggaacttttcgtgacttgggagactctcacccagttctatatcagagtttaaaagatttattggagtatgaagggaatgtggaagatgacatgatgatcactttccagatatcacagacagatctttttggtaacccaatgatgtatgatctaaaggaaaatggtgataaaattccaattacaaatgaaaacaggaaggaatttgtcaatctttattctgactacattctcaataaatcagtagaaaaacagttcaaggcttttcggagaggttttcatatggtgaccaatgaatctcccttaaagtacttattcagaccagaagaaattgaattgcttatatgtggaagccggaatctagatttccaagcactagaagaaactacagaatatgacggtggctataccagggactctgttctgattagggagttctgggaaatcgttcattcatttacagatgaacagaaaagactcttcttgcagtttacaacgggcacagacagagcacctgtgggaggactaggaaaattaaagatgattatagccaaaaatggcccagacacagaaaggttacctacatctcatacttgctttaatgtgcttttacttccggaatactcaagcaaagaaaaacttaaagagagattgttgaaggccatcacgtatgccaaaggatttggcatgctgtaa

SEQ ID NO: 1637 - DNA, 1449 bp, synthetic construct
  source 1..1449: mol_type = other DNA; note = VL12.3-(GS)6-E6AP nucleic acid
ggcagccaacctgtgctgacacagagccccagcgtgtccgccgctcctcggcagcgggtgaccatcagcgtgtccggctctaatagcaacatcggctccaacaccgtgaactggatccagcagctgcctggaagagcccccgagctgctgatgtacgacgacgacctgctcgccccaggcgtgtctgatagattcagcggctctagaagcggcaccagcgccagcctgaccatcagcggactgcagtctgaagatgaggccgactactacgccgctacatgggacgatagcctgaacggctgggtgttcggcggcggaacaaaggtgaccgtcctgagcggcggcagcggcagcggcagcggcagcggcagcggcagcaatccatatttgagactcaaagttagacgtgaccatatcatagatgatgcacttgtccggctagagatgatcgctatggaaaatcctgcagacttgaagaagcagttgtatgtggaatttgaaggagaacaaggagttgatgagggaggtgtttccaaagaattttttcagctggttgtggaggaaatcttcaatccagatattggtatgttcacatacgatgaatctacaaaattgttttggtttaatccatcttcttttgaaactgagggtcagtttactctgattggcatagtactgggtctggctatttacaataactgtatactggatgtacattttcccatggttgtctacaggaagctaatggggaaaaaaggaacttttcgtgacttgggagactctcacccagttctatatcagagtttaaaagatttattggagtatgaagggaatgtggaagatgacatgatgatcactttccagatatcacagacagatctttttggtaacccaatgatgtatgatctaaaggaaaatggtgataaaattccaattacaaatgaaaacaggaaggaatttgtcaatctttattctgactacattctcaataaatcagtagaaaaacagttcaaggcttttcggagaggttttcatatggtgaccaatgaatctcccttaaagtacttattcagaccagaagaaattgaattgcttatatgtggaagccggaatctagatttccaagcactagaagaaactacagaatatgacggtggctataccagggactctgttctgattagggagttctgggaaatcgttcattcatttacagatgaacagaaaagactcttcttgcagtttacaacgggcacagacagagcacctgtgggaggactaggaaaattaaagatgattatagccaaaaatggcccagacacagaaaggttacctacatctcatacttgctttaatgtgcttttacttccggaatactcaagcaaagaaaaacttaaagagagattgttgaaggccatcacgtatgccaaaggatttggcatgctgtaa

SEQ ID NO: 1638 - DNA, 1467 bp, synthetic construct
  source 1..1467: mol_type = other DNA; note = HA-VL12.3-(GS)1-E6AP nucleic acid
atgtacccatacgatgttccagattacgctggcagcggcagcggcagcggcagccaacctgtgctgacacagagccccagcgtgtccgccgctcctcggcagcgggtgaccatcagcgtgtccggctctaatagcaacatcggctccaacaccgtgaactggatccagcagctgcctggaagagcccccgagctgctgatgtacgacgacgacctgctcgccccaggcgtgtctgatagattcagcggctctagaagcggcaccagcgccagcctgaccatcagcggactgcagtctgaagatgaggccgactactacgccgctacatgggacgatagcctgaacggctgggtgttcggcggcggaacaaaggtgaccgtcctgagcggcggcagcaatccatatttgagactcaaagttagacgtgaccatatcatagatgatgcacttgtccggctagagatgatcgctatggaaaatcctgcagacttgaagaagcagttgtatgtggaatttgaaggagaacaaggagttgatgagggaggtgtttccaaagaattttttcagctggttgtggaggaaatcttcaatccagatattggtatgttcacatacgatgaatctacaaaattgttttggtttaatccatcttcttttgaaactgagggtcagtttactctgattggcatagtactgggtctggctatttacaataactgtatactggatgtacattttcccatggttgtctacaggaagctaatggggaaaaaaggaacttttcgtgacttgggagactctcacccagttctatatcagagtttaaaagatttattggagtatgaagggaatgtggaagatgacatgatgatcactttccagatatcacagacagatctttttggtaacccaatgatgtatgatctaaaggaaaatggtgataaaattccaattacaaatgaaaacaggaaggaatttgtcaatctttattctgactacattctcaataaatcagtagaaaaacagttcaaggcttttcggagaggttttcatatggtgaccaatgaatctcccttaaagtacttattcagaccagaagaaattgaattgcttatatgtggaagccggaatctagatttccaagcactagaagaaactacagaatatgacggtggctataccagggactctgttctgattagggagttctgggaaatcgttcattcatttacagatgaacagaaaagactcttcttgcagtttacaacgggcacagacagagcacctgtgggaggactaggaaaattaaagatgattatagccaaaaatggcccagacacagaaaggttacctacatctcatacttgctttaatgtgcttttacttccggaatactcaagcaaagaaaaacttaaagagagattgttgaaggccatcacgtatgccaaaggatttggcatgctgtaa

SEQ ID NO: 1639 - DNA, 1473 bp, synthetic construct
  source 1..1473: mol_type = other DNA; note = HA-VL12.3-(GS)2-E6AP nucleic acid
atgtacccatacgatgttccagattacgctggcagcggcagcggcagcggcagccaacctgtgctgacacagagccccagcgtgtccgccgctcctcggcagcgggtgaccatcagcgtgtccggctctaatagcaacatcggctccaacaccgtgaactggatccagcagctgcctggaagagcccccgagctgctgatgtacgacgacgacctgctcgccccaggcgtgtctgatagattcagcggctctagaagcggcaccagcgccagcctgaccatcagcggactgcagtctgaagatgaggccgactactacgccgctacatgggacgatagcctgaacggctgggtgttcggcggcggaacaaaggtgaccgtcctgagcggcggcagcggcagcaatccatatttgagactcaaagttagacgtgaccatatcatagatgatgcacttgtccggctagagatgatcgctatggaaaatcctgcagacttgaagaagcagttgtatgtggaatttgaaggagaacaaggagttgatgagggaggtgtttccaaagaattttttcagctggttgtggaggaaatcttcaatccagatattggtatgttcacatacgatgaatctacaaaattgttttggtttaatccatcttcttttgaaactgagggtcagtttactctgattggcatagtactgggtctggctatttacaataactgtatactggatgtacattttcccatggttgtctacaggaagctaatggggaaaaaaggaacttttcgtgacttgggagactctcacccagttctatatcagagtttaaaagatttattggagtatgaagggaatgtggaagatgacatgatgatcactttccagatatcacagacagatctttttggtaacccaatgatgtatgatctaaaggaaaatggtgataaaattccaattacaaatgaaaacaggaaggaatttgtcaatctttattctgactacattctcaataaatcagtagaaaaacagttcaaggcttttcggagaggttttcatatggtgaccaatgaatctcccttaaagtacttattcagaccagaagaaattgaattgcttatatgtggaagccggaatctagatttccaagcactagaagaaactacagaatatgacggtggctataccagggactctgttctgattagggagttctgggaaatcgttcattcatttacagatgaacagaaaagactcttcttgcagtttacaacgggcacagacagagcacctgtgggaggactaggaaaattaaagatgattatagccaaaaatggcccagacacagaaaggttacctacatctcatacttgctttaatgtgcttttacttccggaatactcaagcaaagaaaaacttaaagagagattgttgaaggccatcacgtatgccaaaggatttggcatgctgtaa

SEQ ID NO: 1640 - DNA, 1479 bp, synthetic construct
  source 1..1479: mol_type = other DNA; note = HA-VL12.3-(GS)3-E6AP nucleic acid
atgtacccatacgatgttccagattacgctggcagcggcagcggcagcggcagccaacctgtgctgacacagagccccagcgtgtccgccgctcctcggcagcgggtgaccatcagcgtgtccggctctaatagcaacatcggctccaacaccgtgaactggatccagcagctgcctggaagagcccccgagctgctgatgtacgacgacgacctgctcgccccaggcgtgtctgatagattcagcggctctagaagcggcaccagcgccagcctgaccatcagcggactgcagtctgaagatgaggccgactactacgccgctacatgggacgatagcctgaacggctgggtgttcggcggcggaacaaaggtgaccgtcctgagcggcggcagcggcagcggcagcaatccatatttgagactcaaagttagacgtgaccatatcatagatgatgcacttgtccggctagagatgatcgctatggaaaatcctgcagacttgaagaagcagttgtatgtggaatttgaaggagaacaaggagttgatgagggaggtgtttccaaagaattttttcagctggttgtggaggaaatcttcaatccagatattggtatgttcacatacgatgaatctacaaaattgttttggtttaatccatcttcttttgaaactgagggtcagtttactctgattggcatagtactgggtctggctatttacaataactgtatactggatgtacattttcccatggttgtctacaggaagctaatggggaaaaaaggaacttttcgtgacttgggagactctcacccagttctatatcagagtttaaaagatttattggagtatgaagggaatgtggaagatgacatgatgatcactttccagatatcacagacagatctttttggtaacccaatgatgtatgatctaaaggaaaatggtgataaaattccaattacaaatgaaaacaggaaggaatttgtcaatctttattctgactacattctcaataaatcagtagaaaaacagttcaaggcttttcggagaggttttcatatggtgaccaatgaatctcccttaaagtacttattcagaccagaagaaattgaattgcttatatgtggaagccggaatctagatttccaagcactagaagaaactacagaatatgacggtggctataccagggactctgttctgattagggagttctgggaaatcgttcattcatttacagatgaacagaaaagactcttcttgcagtttacaacgggcacagacagagcacctgtgggaggactaggaaaattaaagatgattatagccaaaaatggcccagacacagaaaggttacctacatctcatacttgctttaatgtgcttttacttccggaatactcaagcaaagaaaaacttaaagagagattgttgaaggccatcacgtatgccaaaggatttggcatgctgtaa

SEQ ID NO: 1641 - DNA, 1485 bp, synthetic construct
  source 1..1485: mol_type = other DNA; note = HA-VL12.3-(GS)4-E6AP nucleic acid
atgtacccatacgatgttccagattacgctggcagcggcagcggcagcggcagccaacctgtgctgacacagagccccagcgtgtccgccgctcctcggcagcgggtgaccatcagcgtgtccggctctaatagcaacatcggctccaacaccgtgaactggatccagcagctgcctggaagagcccccgagctgctgatgtacgacgacgacctgctcgccccaggcgtgtctgatagattcagcggctctagaagcggcaccagcgccagcctgaccatcagcggactgcagtctgaagatgaggccgactactacgccgctacatgggacgatagcctgaacggctgggtgttcggcggcggaacaaaggtgaccgtcctgagcggcggcagcggcagcggcagcggcagcaatccatatttgagactcaaagttagacgtgaccatatcatagatgatgcacttgtccggctagagatgatcgctatggaaaatcctgcagacttgaagaagcagttgtatgtggaatttgaaggagaacaaggagttgatgagggaggtgtttccaaagaattttttcagctggttgtggaggaaatcttcaatccagatattggtatgttcacatacgatgaatctacaaaattgttttggtttaatccatcttcttttgaaactgagggtcagtttactctgattggcatagtactgggtctggctatttacaataactgtatactggatgtacattttcccatggttgtctacaggaagctaatggggaaaaaaggaacttttcgtgacttgggagactctcacccagttctatatcagagtttaaaagatttattggagtatgaagggaatgtggaagatgacatgatgatcactttccagatatcacagacagatctttttggtaacccaatgatgtatgatctaaaggaaaatggtgataaaattccaattacaaatgaaaacaggaaggaatttgtcaatctttattctgactacattctcaataaatcagtagaaaaacagttcaaggcttttcggagaggttttcatatggtgaccaatgaatctcccttaaagtacttattcagaccagaagaaattgaattgcttatatgtggaagccggaatctagatttccaagcactagaagaaactacagaatatgacggtggctataccagggactctgttctgattagggagttctgggaaatcgttcattcatttacagatgaacagaaaagactcttcttgcagtttacaacgggcacagacagagcacctgtgggaggactaggaaaattaaagatgattatagccaaaaatggcccagacacagaaaggttacctacatctcatacttgctttaatgtgcttttacttccggaatactcaagcaaagaaaaacttaaagagagattgttgaaggccatcacgtatgccaaaggatttggcatgctgtaa

SEQ ID NO: 1642 - DNA, 1491 bp, synthetic construct
  source 1..1491: mol_type = other DNA; note = HA-VL12.3-(GS)5-E6AP nucleic acid
atgtacccatacgatgttccagattacgctggcagcggcagcggcagcggcagccaacctgtgctgacacagagccccagcgtgtccgccgctcctcggcagcgggtgaccatcagcgtgtccggctctaatagcaacatcggctccaacaccgtgaactggatccagcagctgcctggaagagcccccgagctgctgatgtacgacgacgacctgctcgccccaggcgtgtctgatagattcagcggctctagaagcggcaccagcgccagcctgaccatcagcggactgcagtctgaagatgaggccgactactacgccgctacatgggacgatagcctgaacggctgggtgttcggcggcggaacaaaggtgaccgtcctgagcggcggcagcggcagcggcagcggcagcggcagcaatccatatttgagactcaaagttagacgtgaccatatcatagatgatgcacttgtccggctagagatgatcgctatggaaaatcctgcagacttgaagaagcagttgtatgtggaatttgaaggagaacaaggagttgatgagggaggtgtttccaaagaattttttcagctggttgtggaggaaatcttcaatccagatattggtatgttcacatacgatgaatctacaaaattgttttggtttaatccatcttcttttgaaactgagggtcagtttactctgattggcatagtactgggtctggctatttacaataactgtatactggatgtacattttcccatggttgtctacaggaagctaatggggaaaaaaggaacttttcgtgacttgggagactctcacccagttctatatcagagtttaaaagatttattggagtatgaagggaatgtggaagatgacatgatgatcactttccagatatcacagacagatctttttggtaacccaatgatgtatgatctaaaggaaaatggtgataaaattccaattacaaatgaaaacaggaaggaatttgtcaatctttattctgactacattctcaataaatcagtagaaaaacagttcaaggcttttcggagaggttttcatatggtgaccaatgaatctcccttaaagtacttattcagaccagaagaaattgaattgcttatatgtggaagccggaatctagatttccaagcactagaagaaactacagaatatgacggtggctataccagggactctgttctgattagggagttctgggaaatcgttcattcatttacagatgaacagaaaagactcttcttgcagtttacaacgggcacagacagagcacctgtgggaggactaggaaaattaaagatgattatagccaaaaatggcccagacacagaaaggttacctacatctcatacttgctttaatgtgcttttacttccggaatactcaagcaaagaaaaacttaaagagagattgttgaaggccatcacgtatgccaaaggatttggcatgctgtaa

SEQ ID NO: 1643 - DNA, 1497 bp, synthetic construct
  source 1..1497: mol_type = other DNA; note = HA-VL12.3-(GS)6-E6AP nucleic acid
atgtacccatacgatgttccagattacgctggcagcggcagcggcagcggcagccaacctgtgctgacacagagccccagcgtgtccgccgctcctcggcagcgggtgaccatcagcgtgtccggctctaatagcaacatcggctccaacaccgtgaactggatccagcagctgcctggaagagcccccgagctgctgatgtacgacgacgacctgctcgccccaggcgtgtctgatagattcagcggctctagaagcggcaccagcgccagcctgaccatcagcggactgcagtctgaagatgaggccgactactacgccgctacatgggacgatagcctgaacggctgggtgttcggcggcggaacaaaggtgaccgtcctgagcggcggcagcggcagcggcagcggcagcggcagcggcagcaatccatatttgagactcaaagttagacgtgaccatatcatagatgatgcacttgtccggctagagatgatcgctatggaaaatcctgcagacttgaagaagcagttgtatgtggaatttgaaggagaacaaggagttgatgagggaggtgtttccaaagaattttttcagctggttgtggaggaaatcttcaatccagatattggtatgttcacatacgatgaatctacaaaattgttttggtttaatccatcttcttttgaaactgagggtcagtttactctgattggcatagtactgggtctggctatttacaataactgtatactggatgtacattttcccatggttgtctacaggaagctaatggggaaaaaaggaacttttcgtgacttgggagactctcacccagttctatatcagagtttaaaagatttattggagtatgaagggaatgtggaagatgacatgatgatcactttccagatatcacagacagatctttttggtaacccaatgatgtatgatctaaaggaaaatggtgataaaattccaattacaaatgaaaacaggaaggaatttgtcaatctttattctgactacattctcaataaatcagtagaaaaacagttcaaggcttttcggagaggttttcatatggtgaccaatgaatctcccttaaagtacttattcagaccagaagaaattgaattgcttatatgtggaagccggaatctagatttccaagcactagaagaaactacagaatatgacggtggctataccagggactctgttctgattagggagttctgggaaatcgttcattcatttacagatgaacagaaaagactcttcttgcagtttacaacgggcacagacagagcacctgtgggaggactaggaaaattaaagatgattatagccaaaaatggcccagacacagaaaggttacctacatctcatacttgctttaatgtgcttttacttccggaatactcaagcaaagaaaaacttaaagagagattgttgaaggccatcacgtatgccaaaggatttggcatgctgtaa

SEQ ID NO: 1644 - DNA, 1212 bp, synthetic construct
  source 1..1212: mol_type = other DNA; note = FBXW7b-(GS)1-VL12.3 nucleic acid
tgtgtcccgagaagcggtttgatactgagctgcatttgcctttactgtggagttttgttgccggttctgctccctaatcttccttttctgacgtgcctgagcatgtccacattagaatctgtgacatacctacctgaaaaaggtttatattgtcagagactgccaagcagccggacacacgggggcacagaatcactgaaggggaaaaatacagaaaatatgggtttctacggcacattaaaaatgattttttacaaaatgaaaagaaagttggaccatggttctgaggtccgctctttttctttgggaaagaaaccatgcaaagtctcagaatatacaagtaccactgggcttgtaccatgttcagcaacaccaacaacttttggggacctcagagcagccaatggccaagggcaacaacgacgccgaattacatctgtccagccacctacaggcctccaggaatggctaaaaatgtttcagagctggagtggaccagagaaattgcttgctttagatgaactcattgatagttgtgaaccaacacaagtaaaacatatgatgcaagtgatagaaccccagtttcaacgagacttcatttcattgctccctaaagagttggcactctatgtgctttcattcctggaacccaaagacctgctacaagcagctcagacatgtcgctactggagaattttggctgaagacaaccttctctggagagagaaatgcaaagaagaggggattgatgaaccattgcacatcaagagaagaaaagtaataaaaccaggtttcatacacagtccatggaaaagtgcatacatcagacagcacagaattgatactaactcgaggcgaggaggcagcggcagccaacctgtgctgacacagagccccagcgtgtccgccgctcctcggcagcgggtgaccatcagcgtgtccggctctaatagcaacatcggctccaacaccgtgaactggatccagcagctgcctggaagagcccccgagctgctgatgtacgacgacgacctgctcgccccaggcgtgtctgatagattcagcggctctagaagcggcaccagcgccagcctgaccatcagcggactgcagtctgaagatgaggccgactactacgccgctacatgggacgatagcctgaacggctgggtgttcggcggcggaacaaaggtgaccgtcctgagcggctaa

SEQ ID NO: 1645 - DNA, 1218 bp, synthetic construct
  source 1..1218: mol_type = other DNA; note = FBXW7b-(GS)2-VL12.3 nucleic acid
tgtgtcccgagaagcggtttgatactgagctgcatttgcctttactgtggagttttgttgccggttctgctccctaatcttccttttctgacgtgcctgagcatgtccacattagaatctgtgacatacctacctgaaaaaggtttatattgtcagagactgccaagcagccggacacacgggggcacagaatcactgaaggggaaaaatacagaaaatatgggtttctacggcacattaaaaatgattttttacaaaatgaaaagaaagttggaccatggttctgaggtccgctctttttctttgggaaagaaaccatgcaaagtctcagaatatacaagtaccactgggcttgtaccatgttcagcaacaccaacaacttttggggacctcagagcagccaatggccaagggcaacaacgacgccgaattacatctgtccagccacctacaggcctccaggaatggctaaaaatgtttcagagctggagtggaccagagaaattgcttgctttagatgaactcattgatagttgtgaaccaacacaagtaaaacatatgatgcaagtgatagaaccccagtttcaacgagacttcatttcattgctccctaaagagttggcactctatgtgctttcattcctggaacccaaagacctgctacaagcagctcagacatgtcgctactggagaattttggctgaagacaaccttctctggagagagaaatgcaaagaagaggggattgatgaaccattgcacatcaagagaagaaaagtaataaaaccaggtttcatacacagtccatggaaaagtgcatacatcagacagcacagaattgatactaactcgaggcgaggaggcagcggcagcggcagccaacctgtgctgacacagagccccagcgtgtccgccgctcctcggcagcgggtgaccatcagcgtgtccggctctaatagcaacatcggctccaacaccgtgaactggatccagcagctgcctggaagagcccccgagctgctgatgtacgacgacgacctgctcgccccaggcgtgtctgatagattcagcggctctagaagcggcaccagcgccagcctgaccatcagcggactgcagtctgaagatgaggccgactactacgccgctacatgggacgatagcctgaacggctgggtgttcggcggcggaacaaaggtgaccgtcctgagcggctaa

SEQ ID NO: 1646 - DNA, 1224 bp, synthetic construct
  source 1..1224: mol_type = other DNA; note = FBXW7b-(GS)3-VL12.3 nucleic acid
tgtgtcccgagaagcggtttgatactgagctgcatttgcctttactgtggagttttgttgccggttctgctccctaatcttccttttctgacgtgcctgagcatgtccacattagaatctgtgacatacctacctgaaaaaggtttatattgtcagagactgccaagcagccggacacacgggggcacagaatcactgaaggggaaaaatacagaaaatatgggtttctacggcacattaaaaatgattttttacaaaatgaaaagaaagttggaccatggttctgaggtccgctctttttctttgggaaagaaaccatgcaaagtctcagaatatacaagtaccactgggcttgtaccatgttcagcaacaccaacaacttttggggacctcagagcagccaatggccaagggcaacaacgacgccgaattacatctgtccagccacctacaggcctccaggaatggctaaaaatgtttcagagctggagtggaccagagaaattgcttgctttagatgaactcattgatagttgtgaaccaacacaagtaaaacatatgatgcaagtgatagaaccccagtttcaacgagacttcatttcattgctccctaaagagttggcactctatgtgctttcattcctggaacccaaagacctgctacaagcagctcagacatgtcgctactggagaattttggctgaagacaaccttctctggagagagaaatgcaaagaagaggggattgatgaaccattgcacatcaagagaagaaaagtaataaaaccaggtttcatacacagtccatggaaaagtgcatacatcagacagcacagaattgatactaactcgaggcgaggaggcagcggcagcggcagcggcagccaacctgtgctgacacagagccccagcgtgtccgccgctcctcggcagcgggtgaccatcagcgtgtccggctctaatagcaacatcggctccaacaccgtgaactggatccagcagctgcctggaagagcccccgagctgctgatgtacgacgacgacctgctcgccccaggcgtgtctgatagattcagcggctctagaagcggcaccagcgccagcctgaccatcagcggactgcagtctgaagatgaggccgactactacgccgctacatgggacgatagcctgaacggctgggtgttcggcggcggaacaaaggtgaccgtcctgagcggctaa

SEQ ID NO: 1647 - DNA, 1230 bp, synthetic construct
  source 1..1230: mol_type = other DNA; note = FBXW7b-(GS)4-VL12.3 nucleic acid
tgtgtcccgagaagcggtttgatactgagctgcatttgcctttactgtggagttttgttgccggttctgctccctaatcttccttttctgacgtgcctgagcatgtccacattagaatctgtgacatacctacctgaaaaaggtttatattgtcagagactgccaagcagccggacacacgggggcacagaatcactgaaggggaaaaatacagaaaatatgggtttctacggcacattaaaaatgattttttacaaaatgaaaagaaagttggaccatggttctgaggtccgctctttttctttgggaaagaaaccatgcaaagtctcagaatatacaagtaccactgggcttgtaccatgttcagcaacaccaacaacttttggggacctcagagcagccaatggccaagggcaacaacgacgccgaattacatctgtccagccacctacaggcctccaggaatggctaaaaatgtttcagagctggagtggaccagagaaattgcttgctttagatgaactcattgatagttgtgaaccaacacaagtaaaacatatgatgcaagtgatagaaccccagtttcaacgagacttcatttcattgctccctaaagagttggcactctatgtgctttcattcctggaacccaaagacctgctacaagcagctcagacatgtcgctactggagaattttggctgaagacaaccttctctggagagagaaatgcaaagaagaggggattgatgaaccattgcacatcaagagaagaaaagtaataaaaccaggtttcatacacagtccatggaaaagtgcatacatcagacagcacagaattgatactaactcgaggcgaggaggcagcggcagcggcagcggcagcggcagccaacctgtgctgacacagagccccagcgtgtccgccgctcctcggcagcgggtgaccatcagcgtgtccggctctaatagcaacatcggctccaacaccgtgaactggatccagcagctgcctggaagagcccccgagctgctgatgtacgacgacgacctgctcgccccaggcgtgtctgatagattcagcggctctagaagcggcaccagcgccagcctgaccatcagcggactgcagtctgaagatgaggccgactactacgccgctacatgggacgatagcctgaacggctgggtgttcggcggcggaacaaaggtgaccgtcctgagcggctaa

SEQ ID NO: 1648 - DNA, 1236 bp, synthetic construct
  source 1..1236: mol_type = other DNA; note = FBXW7b-(GS)5-VL12.3 nucleic acid
tgtgtcccgagaagcggtttgatactgagctgcatttgcctttactgtggagttttgttgccggttctgctccctaatcttccttttctgacgtgcctgagcatgtccacattagaatctgtgacatacctacctgaaaaaggtttatattgtcagagactgccaagcagccggacacacgggggcacagaatcactgaaggggaaaaatacagaaaatatgggtttctacggcacattaaaaatgattttttacaaaatgaaaagaaagttggaccatggttctgaggtccgctctttttctttgggaaagaaaccatgcaaagtctcagaatatacaagtaccactgggcttgtaccatgttcagcaacaccaacaacttttggggacctcagagcagccaatggccaagggcaacaacgacgccgaattacatctgtccagccacctacaggcctccaggaatggctaaaaatgtttcagagctggagtggaccagagaaattgcttgctttagatgaactcattgatagttgtgaaccaacacaagtaaaacatatgatgcaagtgatagaaccccagtttcaacgagacttcatttcattgctccctaaagagttggcactctatgtgctttcattcctggaacccaaagacctgctacaagcagctcagacatgtcgctactggagaattttggctgaagacaaccttctctggagagagaaatgcaaagaagaggggattgatgaaccattgcacatcaagagaagaaaagtaataaaaccaggtttcatacacagtccatggaaaagtgcatacatcagacagcacagaattgatactaactcgaggcgaggaggcagcggcagcggcagcggcagcggcagcggcagccaacctgtgctgacacagagccccagcgtgtccgccgctcctcggcagcgggtgaccatcagcgtgtccggctctaatagcaacatcggctccaacaccgtgaactggatccagcagctgcctggaagagcccccgagctgctgatgtacgacgacgacctgctcgccccaggcgtgtctgatagattcagcggctctagaagcggcaccagcgccagcctgaccatcagcggactgcagtctgaagatgaggccgactactacgccgctacatgggacgatagcctgaacggctgggtgttcggcggcggaacaaaggtgaccgtcctgagcggctaa

SEQ ID NO: 1649 - DNA, 1242 bp, synthetic construct
  source 1..1242: mol_type = other DNA; note = FBXW7b-(GS)6-VL12.3 nucleic acid
tgtgtcccgagaagcggtttgatactgagctgcatttgcctttactgtggagttttgttgccggttctgctccctaatcttccttttctgacgtgcctgagcatgtccacattagaatctgtgacatacctacctgaaaaaggtttatattgtcagagactgccaagcagccggacacacgggggcacagaatcactgaaggggaaaaatacagaaaatatgggtttctacggcacattaaaaatgattttttacaaaatgaaaagaaagttggaccatggttctgaggtccgctctttttctttgggaaagaaaccatgcaaagtctcagaatatacaagtaccactgggcttgtaccatgttcagcaacaccaacaacttttggggacctcagagcagccaatggccaagggcaacaacgacgccgaattacatctgtccagccacctacaggcctccaggaatggctaaaaatgtttcagagctggagtggaccagagaaattgcttgctttagatgaactcattgatagttgtgaaccaacacaagtaaaacatatgatgcaagtgatagaaccccagtttcaacgagacttcatttcattgctccctaaagagttggcactctatgtgctttcattcctggaacccaaagacctgctacaagcagctcagacatgtcgctactggagaattttggctgaagacaaccttctctggagagagaaatgcaaagaagaggggattgatgaaccattgcacatcaagagaagaaaagtaataaaaccaggtttcatacacagtccatggaaaagtgcatacatcagacagcacagaattgatactaactcgaggcgaggaggcagcggcagcggcagcggcagcggcagcggcagcggcagccaacctgtgctgacacagagccccagcgtgtccgccgctcctcggcagcgggtgaccatcagcgtgtccggctctaatagcaacatcggctccaacaccgtgaactggatccagcagctgcctggaagagcccccgagctgctgatgtacgacgacgacctgctcgccccaggcgtgtctgatagattcagcggctctagaagcggcaccagcgccagcctgaccatcagcggactgcagtctgaagatgaggccgactactacgccgctacatgggacgatagcctgaacggctgggtgttcggcggcggaacaaaggtgaccgtcctgagcggctaa

SEQ ID NO: 1650 - DNA, 1242 bp, synthetic construct
  source 1..1242: mol_type = other DNA; note = HA-FBXW7b-(GS)1-VL12.3 nucleic acid
atgtacccatacgatgttccagattacgcttgtgtcccgagaagcggtttgatactgagctgcatttgcctttactgtggagttttgttgccggttctgctccctaatcttccttttctgacgtgcctgagcatgtccacattagaatctgtgacatacctacctgaaaaaggtttatattgtcagagactgccaagcagccggacacacgggggcacagaatcactgaaggggaaaaatacagaaaatatgggtttctacggcacattaaaaatgattttttacaaaatgaaaagaaagttggaccatggttctgaggtccgctctttttctttgggaaagaaaccatgcaaagtctcagaatatacaagtaccactgggcttgtaccatgttcagcaacaccaacaacttttggggacctcagagcagccaatggccaagggcaacaacgacgccgaattacatctgtccagccacctacaggcctccaggaatggctaaaaatgtttcagagctggagtggaccagagaaattgcttgctttagatgaactcattgatagttgtgaaccaacacaagtaaaacatatgatgcaagtgatagaaccccagtttcaacgagacttcatttcattgctccctaaagagttggcactctatgtgctttcattcctggaacccaaagacctgctacaagcagctcagacatgtcgctactggagaattttggctgaagacaaccttctctggagagagaaatgcaaagaagaggggattgatgaaccattgcacatcaagagaagaaaagtaataaaaccaggtttcatacacagtccatggaaaagtgcatacatcagacagcacagaattgatactaactcgaggcgaggaggcagcggcagccaacctgtgctgacacagagccccagcgtgtccgccgctcctcggcagcgggtgaccatcagcgtgtccggctctaatagcaacatcggctccaacaccgtgaactggatccagcagctgcctggaagagcccccgagctgctgatgtacgacgacgacctgctcgccccaggcgtgtctgatagattcagcggctctagaagcggcaccagcgccagcctgaccatcagcggactgcagtctgaagatgaggccgactactacgccgctacatgggacgatagcctgaacggctgggtgttcggcggcggaacaaaggtgaccgtcctgagcggctaa

SEQ ID NO: 1651 - DNA, 1248 bp, synthetic construct
  source 1..1248: mol_type = other DNA; note = HA-FBXW7b-(GS)2-VL12.3 nucleic acid
atgtacccatacgatgttccagattacgcttgtgtcccgagaagcggtttgatactgagctgcatttgcctttactgtggagttttgttgccggttctgctccctaatcttccttttctgacgtgcctgagcatgtccacattagaatctgtgacatacctacctgaaaaaggtttatattgtcagagactgccaagcagccggacacacgggggcacagaatcactgaaggggaaaaatacagaaaatatgggtttctacggcacattaaaaatgattttttacaaaatgaaaagaaagttggaccatggttctgaggtccgctctttttctttgggaaagaaaccatgcaaagtctcagaatatacaagtaccactgggcttgtaccatgttcagcaacaccaacaacttttggggacctcagagcagccaatggccaagggcaacaacgacgccgaattacatctgtccagccacctacaggcctccaggaatggctaaaaatgtttcagagctggagtggaccagagaaattgcttgctttagatgaactcattgatagttgtgaaccaacacaagtaaaacatatgatgcaagtgatagaaccccagtttcaacgagacttcatttcattgctccctaaagagttggcactctatgtgctttcattcctggaacccaaagacctgctacaagcagctcagacatgtcgctactggagaattttggctgaagacaaccttctctggagagagaaatgcaaagaagaggggattgatgaaccattgcacatcaagagaagaaaagtaataaaaccaggtttcatacacagtccatggaaaagtgcatacatcagacagcacagaattgatactaactcgaggcgaggaggcagcggcagcggcagccaacctgtgctgacacagagccccagcgtgtccgccgctcctcggcagcgggtgaccatcagcgtgtccggctctaatagcaacatcggctccaacaccgtgaactggatccagcagctgcctggaagagcccccgagctgctgatgtacgacgacgacctgctcgccccaggcgtgtctgatagattcagcggctctagaagcggcaccagcgccagcctgaccatcagcggactgcagtctgaagatgaggccgactactacgccgctacatgggacgatagcctgaacggctgggtgttcggcggcggaacaaaggtgaccgtcctgagcggctaa

SEQ ID NO: 1652 - DNA, 1254 bp, synthetic construct
  source 1..1254: mol_type = other DNA; note = HA-FBXW7b-(GS)3-VL12.3 nucleic acid
atgtacccatacgatgttccagattacgcttgtgtcccgagaagcggtttgatactgagctgcatttgcctttactgtggagttttgttgccggttctgctccctaatcttccttttctgacgtgcctgagcatgtccacattagaatctgtgacatacctacctgaaaaaggtttatattgtcagagactgccaagcagccggacacacgggggcacagaatcactgaaggggaaaaatacagaaaatatgggtttctacggcacattaaaaatgattttttacaaaatgaaaagaaagttggaccatggttctgaggtccgctctttttctttgggaaagaaaccatgcaaagtctcagaatatacaagtaccactgggcttgtaccatgttcagcaacaccaacaacttttggggacctcagagcagccaatggccaagggcaacaacgacgccgaattacatctgtccagccacctacaggcctccaggaatggctaaaaatgtttcagagctggagtggaccagagaaattgcttgctttagatgaactcattgatagttgtgaaccaacacaagtaaaacatatgatgcaagtgatagaaccccagtttcaacgagacttcatttcattgctccctaaagagttggcactctatgtgctttcattcctggaacccaaagacctgctacaagcagctcagacatgtcgctactggagaattttggctgaagacaaccttctctggagagagaaatgcaaagaagaggggattgatgaaccattgcacatcaagagaagaaaagtaataaaaccaggtttcatacacagtccatggaaaagtgcatacatcagacagcacagaattgatactaactcgaggcgaggaggcagcggcagcggcagcggcagccaacctgtgctgacacagagccccagcgtgtccgccgctcctcggcagcgggtgaccatcagcgtgtccggctctaatagcaacatcggctccaacaccgtgaactggatccagcagctgcctggaagagcccccgagctgctgatgtacgacgacgacctgctcgccccaggcgtgtctgatagattcagcggctctagaagcggcaccagcgccagcctgaccatcagcggactgcagtctgaagatgaggccgactactacgccgctacatgggacgatagcctgaacggctgggtgttcggcggcggaacaaaggtgaccgtcctgagcggctaa

SEQ ID NO: 1653 - DNA, 1260 bp, synthetic construct
  source 1..1260: mol_type = other DNA; note = HA-FBXW7b-(GS)4-VL12.3 nucleic acid
atgtacccatacgatgttccagattacgcttgtgtcccgagaagcggtttgatactgagctgcatttgcctttactgtggagttttgttgccggttctgctccctaatcttccttttctgacgtgcctgagcatgtccacattagaatctgtgacatacctacctgaaaaaggtttatattgtcagagactgccaagcagccggacacacgggggcacagaatcactgaaggggaaaaatacagaaaatatgggtttctacggcacattaaaaatgattttttacaaaatgaaaagaaagttggaccatggttctgaggtccgctctttttctttgggaaagaaaccatgcaaagtctcagaatatacaagtaccactgggcttgtaccatgttcagcaacaccaacaacttttggggacctcagagcagccaatggccaagggcaacaacgacgccgaattacatctgtccagccacctacaggcctccaggaatggctaaaaatgtttcagagctggagtggaccagagaaattgcttgctttagatgaactcattgatagttgtgaaccaacacaagtaaaacatatgatgcaagtgatagaaccccagtttcaacgagacttcatttcattgctccctaaagagttggcactctatgtgctttcattcctggaacccaaagacctgctacaagcagctcagacatgtcgctactggagaattttggctgaagacaaccttctctggagagagaaatgcaaagaagaggggattgatgaaccattgcacatcaagagaagaaaagtaataaaaccaggtttcatacacagtccatggaaaagtgcatacatcagacagcacagaattgatactaactcgaggcgaggaggcagcggcagcggcagcggcagcggcagccaacctgtgctgacacagagccccagcgtgtccgccgctcctcggcagcgggtgaccatcagcgtgtccggctctaatagcaacatcggctccaacaccgtgaactggatccagcagctgcctggaagagcccccgagctgctgatgtacgacgacgacctgctcgccccaggcgtgtctgatagattcagcggctctagaagcggcaccagcgccagcctgaccatcagcggactgcagtctgaagatgaggccgactactacgccgctacatgggacgatagcctgaacggctgggtgttcggcggcggaacaaaggtgaccgtcctgagcggctaa

SEQ ID NO: 1654 - DNA, 1266 bp, synthetic construct
  source 1..1266: mol_type = other DNA; note = HA-FBXW7b-(GS)5-VL12.3 nucleic acid
atgtacccatacgatgttccagattacgcttgtgtcccgagaagcggtttgatactgagctgcatttgcctttactgtggagttttgttgccggttctgctccctaatcttccttttctgacgtgcctgagcatgtccacattagaatctgtgacatacctacctgaaaaaggtttatattgtcagagactgccaagcagccggacacacgggggcacagaatcactgaaggggaaaaatacagaaaatatgggtttctacggcacattaaaaatgattttttacaaaatgaaaagaaagttggaccatggttctgaggtccgctctttttctttgggaaagaaaccatgcaaagtctcagaatatacaagtaccactgggcttgtaccatgttcagcaacaccaacaacttttggggacctcagagcagccaatggccaagggcaacaacgacgccgaattacatctgtccagccacctacaggcctccaggaatggctaaaaatgtttcagagctggagtggaccagagaaattgcttgctttagatgaactcattgatagttgtgaaccaacacaagtaaaacatatgatgcaagtgatagaaccccagtttcaacgagacttcatttcattgctccctaaagagttggcactctatgtgctttcattcctggaacccaaagacctgctacaagcagctcagacatgtcgctactggagaattttggctgaagacaaccttctctggagagagaaatgcaaagaagaggggattgatgaaccattgcacatcaagagaagaaaagtaataaaaccaggtttcatacacagtccatggaaaagtgcatacatcagacagcacagaattgatactaactcgaggcgaggaggcagcggcagcggcagcggcagcggcagcggcagccaacctgtgctgacacagagccccagcgtgtccgccgctcctcggcagcgggtgaccatcagcgtgtccggctctaatagcaacatcggctccaacaccgtgaactggatccagcagctgcctggaagagcccccgagctgctgatgtacgacgacgacctgctcgccccaggcgtgtctgatagattcagcggctctagaagcggcaccagcgccagcctgaccatcagcggactgcagtctgaagatgaggccgactactacgccgctacatgggacgatagcctgaacggctgggtgttcggcggcggaacaaaggtgaccgtcctgagcggctaa

SEQ ID NO: 1655 - DNA, 1272 bp, synthetic construct
  source 1..1272: mol_type = other DNA; note = HA-FBXW7b-(GS)6-VL12.3 nucleic acid
atgtacccatacgatgttccagattacgcttgtgtcccgagaagcggtttgatactgagctgcatttgcctttactgtggagttttgttgccggttctgctccctaatcttccttttctgacgtgcctgagcatgtccacattagaatctgtgacatacctacctgaaaaaggtttatattgtcagagactgccaagcagccggacacacgggggcacagaatcactgaaggggaaaaatacagaaaatatgggtttctacggcacattaaaaatgattttttacaaaatgaaaagaaagttggaccatggttctgaggtccgctctttttctttgggaaagaaaccatgcaaagtctcagaatatacaagtaccactgggcttgtaccatgttcagcaacaccaacaacttttggggacctcagagcagccaatggccaagggcaacaacgacgccgaattacatctgtccagccacctacaggcctccaggaatggctaaaaatgtttcagagctggagtggaccagagaaattgcttgctttagatgaactcattgatagttgtgaaccaacacaagtaaaacatatgatgcaagtgatagaaccccagtttcaacgagacttcatttcattgctccctaaagagttggcactctatgtgctttcattcctggaacccaaagacctgctacaagcagctcagacatgtcgctactggagaattttggctgaagacaaccttctctggagagagaaatgcaaagaagaggggattgatgaaccattgcacatcaagagaagaaaagtaataaaaccaggtttcatacacagtccatggaaaagtgcatacatcagacagcacagaattgatactaactcgaggcgaggaggcagcggcagcggcagcggcagcggcagcggcagcggcagccaacctgtgctgacacagagccccagcgtgtccgccgctcctcggcagcgggtgaccatcagcgtgtccggctctaatagcaacatcggctccaacaccgtgaactggatccagcagctgcctggaagagcccccgagctgctgatgtacgacgacgacctgctcgccccaggcgtgtctgatagattcagcggctctagaagcggcaccagcgccagcctgaccatcagcggactgcagtctgaagatgaggccgactactacgccgctacatgggacgatagcctgaacggctgggtgttcggcggcggaacaaaggtgaccgtcctgagcggctaa

SEQ ID NO: 1656 - DNA, 1314 bp, synthetic construct
  source 1..1314: mol_type = other DNA; note = Keap1-(GS)1-VL12.3 nucleic acid
cagccagatcccaggcctagcggggctggggcctgctgccgattcctgcccctgcagtcacagtgccctgagggggcaggggacgcggtgatgtacgcctccactgagtgcaaggcggaggtgacgccctcccagcatggcaaccgcaccttcagctacaccctggaggatcataccaagcaggcctttggcatcatgaacgagctgcggctcagccagcagctgtgtgacgtcacactgcaggtcaagtaccaggatgcaccggccgcccagttcatggcccacaaggtggtgctggcctcatccagccctgtcttcaaggccatgttcaccaacgggctgcgggagcagggcatggaggtggtgtccattgagggtatccaccccaaggtcatggagcgcctcattgaattcgcctacacggcctccatctccatgggcgagaagtgtgtcctccacgtcatgaacggtgctgtcatgtaccagatcgacagcgttgtccgtgcctgcagtgacttcctggtgcagcagctggaccccagcaatgccatcggcatcgccaacttcgctgagcagattggctgtgtggagttgcaccagcgtgcccgggagtacatctacatgcattttggggaggtggccaagcaagaggagttcttcaacctgtcccactgccaactggtgaccctcatcagccgggacgacctgaacgtgcgctgcgagtccgaggtcttccacgcctgcatcaactgggtcaagtacgactgcgaacagcgacggttctacgtccaggcgctgctgcgggccgtgcgctgccactcgttgacgccgaacttcctgcagatgcagctgcagaagtgcgagatcctgcagtccgactcccgctgcaaggactacctggtcaagatcttcgaggagctcaccctgcacaagcccacgcaggtgatgccctgccgggcgcccggcagcggcagccaacctgtgctgacacagagccccagcgtgtccgccgctcctcggcagcgggtgaccatcagcgtgtccggctctaatagcaacatcggctccaacaccgtgaactggatccagcagctgcctggaagagcccccgagctgctgatgtacgacgacgacctgctcgccccaggcgtgtctgatagattcagcggctctagaagcggcaccagcgccagcctgaccatcagcggactgcagtctgaagatgaggccgactactacgccgctacatgggacgatagcctgaacggctgggtgttcggcggcggaacaaaggtgaccgtcctgagcggctaa

SEQ ID NO: 1657 - DNA, 1320 bp, synthetic construct
  source 1..1320: mol_type = other DNA; note = Keap1-(GS)2-VL12.3 nucleic acid
cagccagatcccaggcctagcggggctggggcctgctgccgattcctgcccctgcagtcacagtgccctgagggggcaggggacgcggtgatgtacgcctccactgagtgcaaggcggaggtgacgccctcccagcatggcaaccgcaccttcagctacaccctggaggatcataccaagcaggcctttggcatcatgaacgagctgcggctcagccagcagctgtgtgacgtcacactgcaggtcaagtaccaggatgcaccggccgcccagttcatggcccacaaggtggtgctggcctcatccagccctgtcttcaaggccatgttcaccaacgggctgcgggagcagggcatggaggtggtgtccattgagggtatccaccccaaggtcatggagcgcctcattgaattcgcctacacggcctccatctccatgggcgagaagtgtgtcctccacgtcatgaacggtgctgtcatgtaccagatcgacagcgttgtccgtgcctgcagtgacttcctggtgcagcagctggaccccagcaatgccatcggcatcgccaacttcgctgagcagattggctgtgtggagttgcaccagcgtgcccgggagtacatctacatgcattttggggaggtggccaagcaagaggagttcttcaacctgtcccactgccaactggtgaccctcatcagccgggacgacctgaacgtgcgctgcgagtccgaggtcttccacgcctgcatcaactgggtcaagtacgactgcgaacagcgacggttctacgtccaggcgctgctgcgggccgtgcgctgccactcgttgacgccgaacttcctgcagatgcagctgcagaagtgcgagatcctgcagtccgactcccgctgcaaggactacctggtcaagatcttcgaggagctcaccctgcacaagcccacgcaggtgatgccctgccgggcgcccggcagcggcagcggcagccaacctgtgctgacacagagccccagcgtgtccgccgctcctcggcagcgggtgaccatcagcgtgtccggctctaatagcaacatcggctccaacaccgtgaactggatccagcagctgcctggaagagcccccgagctgctgatgtacgacgacgacctgctcgccccaggcgtgtctgatagattcagcggctctagaagcggcaccagcgccagcctgaccatcagcggactgcagtctgaagatgaggccgactactacgccgctacatgggacgatagcctgaacggctgggtgttcggcggcggaacaaaggtgaccgtcctgagcggctaa

SEQ ID NO: 1658 - DNA, 1326 bp, synthetic construct
  source 1..1326: mol_type = other DNA; note = Keap1-(GS)3-VL12.3 nucleic acid
cagccagatcccaggcctagcggggctggggcctgctgccgattcctgcccctgcagtcacagtgccctgagggggcaggggacgcggtgatgtacgcctccactgagtgcaaggcggaggtgacgccctcccagcatggcaaccgcaccttcagctacaccctggaggatcataccaagcaggcctttggcatcatgaacgagctgcggctcagccagcagctgtgtgacgtcacactgcaggtcaagtaccaggatgcaccggccgcccagttcatggcccacaaggtggtgctggcctcatccagccctgtcttcaaggccatgttcaccaacgggctgcgggagcagggcatggaggtggtgtccattgagggtatccaccccaaggtcatggagcgcctcattgaattcgcctacacggcctccatctccatgggcgagaagtgtgtcctccacgtcatgaacggtgctgtcatgtaccagatcgacagcgttgtccgtgcctgcagtgacttcctggtgcagcagctggaccccagcaatgccatcggcatcgccaacttcgctgagcagattggctgtgtggagttgcaccagcgtgcccgggagtacatctacatgcattttggggaggtggccaagcaagaggagttcttcaacctgtcccactgccaactggtgaccctcatcagccgggacgacctgaacgtgcgctgcgagtccgaggtcttccacgcctgcatcaactgggtcaagtacgactgcgaacagcgacggttctacgtccaggcgctgctgcgggccgtgcgctgccactcgttgacgccgaacttcctgcagatgcagctgcagaagtgcgagatcctgcagtccgactcccgctgcaaggactacctggtcaagatcttcgaggagctcaccctgcacaagcccacgcaggtgatgccctgccgggcgcccggcagcggcagcggcagcggcagccaacctgtgctgacacagagccccagcgtgtccgccgctcctcggcagcgggtgaccatcagcgtgtccggctctaatagcaacatcggctccaacaccgtgaactggatccagcagctgcctggaagagcccccgagctgctgatgtacgacgacgacctgctcgccccaggcgtgtctgatagattcagcggctctagaagcggcaccagcgccagcctgaccatcagcggactgcagtctgaagatgaggccgactactacgccgctacatgggacgatagcctgaacggctgggtgttcggcggcggaacaaaggtgaccgtcctgagcggctaa

SEQ ID NO: 1659 - DNA, 1332 bp, synthetic construct
  source 1..1332: mol_type = other DNA; note = Keap1-(GS)4-VL12.3 nucleic acid
cagccagatcccaggcctagcggggctggggcctgctgccgattcctgcccctgcagtcacagtgccctgagggggcaggggacgcggtgatgtacgcctccactgagtgcaaggcggaggtgacgccctcccagcatggcaaccgcaccttcagctacaccctggaggatcataccaagcaggcctttggcatcatgaacgagctgcggctcagccagcagctgtgtgacgtcacactgcaggtcaagtaccaggatgcaccggccgcccagttcatggcccacaaggtggtgctggcctcatccagccctgtcttcaaggccatgttcaccaacgggctgcgggagcagggcatggaggtggtgtccattgagggtatccaccccaaggtcatggagcgcctcattgaattcgcctacacggcctccatctccatgggcgagaagtgtgtcctccacgtcatgaacggtgctgtcatgtaccagatcgacagcgttgtccgtgcctgcagtgacttcctggtgcagcagctggaccccagcaatgccatcggcatcgccaacttcgctgagcagattggctgtgtggagttgcaccagcgtgcccgggagtacatctacatgcattttggggaggtggccaagcaagaggagttcttcaacctgtcccactgccaactggtgaccctcatcagccgggacgacctgaacgtgcgctgcgagtccgaggtcttccacgcctgcatcaactgggtcaagtacgactgcgaacagcgacggttctacgtccaggcgctgctgcgggccgtgcgctgccactcgttgacgccgaacttcctgcagatgcagctgcagaagtgcgagatcctgcagtccgactcccgctgcaaggactacctggtcaagatcttcgaggagctcaccctgcacaagcccacgcaggtgatgccctgccgggcgcccggcagcggcagcggcagcggcagcggcagccaacctgtgctgacacagagccccagcgtgtccgccgctcctcggcagcgggtgaccatcagcgtgtccggctctaatagcaacatcggctccaacaccgtgaactggatccagcagctgcctggaagagcccccgagctgctgatgtacgacgacgacctgctcgccccaggcgtgtctgatagattcagcggctctagaagcggcaccagcgccagcctgaccatcagcggactgcagtctgaagatgaggccgactactacgccgctacatgggacgatagcctgaacggctgggtgttcggcggcggaacaaaggtgaccgtcctgagcggctaa

SEQ ID NO: 1660 - DNA, 1338 bp, synthetic construct
  source 1..1338: mol_type = other DNA; note = Keap1-(GS)5-VL12.3 nucleic acid
cagccagatcccaggcctagcggggctggggcctgctgccgattcctgcccctgcagtcacagtgccctgagggggcaggggacgcggtgatgtacgcctccactgagtgcaaggcggaggtgacgccctcccagcatggcaaccgcaccttcagctacaccctggaggatcataccaagcaggcctttggcatcatgaacgagctgcggctcagccagcagctgtgtgacgtcacactgcaggtcaagtaccaggatgcaccggccgcccagttcatggcccacaaggtggtgctggcctcatccagccctgtcttcaaggccatgttcaccaacgggctgcgggagcagggcatggaggtggtgtccattgagggtatccaccccaaggtcatggagcgcctcattgaattcgcctacacggcctccatctccatgggcgagaagtgtgtcctccacgtcatgaacggtgctgtcatgtaccagatcgacagcgttgtccgtgcctgcagtgacttcctggtgcagcagctggaccccagcaatgccatcggcatcgccaacttcgctgagcagattggctgtgtggagttgcaccagcgtgcccgggagtacatctacatgcattttggggaggtggccaagcaagaggagttcttcaacctgtcccactgccaactggtgaccctcatcagccgggacgacctgaacgtgcgctgcgagtccgaggtcttccacgcctgcatcaactgggtcaagtacgactgcgaacagcgacggttctacgtccaggcgctgctgcgggccgtgcgctgccactcgttgacgccgaacttcctgcagatgcagctgcagaagtgcgagatcctgcagtccgactcccgctgcaaggactacctggtcaagatcttcgaggagctcaccctgcacaagcccacgcaggtgatgccctgccgggcgcccggcagcggcagcggcagcggcagcggcagcggcagccaacctgtgctgacacagagccccagcgtgtccgccgctcctcggcagcgggtgaccatcagcgtgtccggctctaatagcaacatcggctccaacaccgtgaactggatccagcagctgcctggaagagcccccgagctgctgatgtacgacgacgacctgctcgccccaggcgtgtctgatagattcagcggctctagaagcggcaccagcgccagcctgaccatcagcggactgcagtctgaagatgaggccgactactacgccgctacatgggacgatagcctgaacggctgggtgttcggcggcggaacaaaggtgaccgtcctgagcggctaa

SEQ ID NO: 1661 - DNA, 1344 bp, synthetic construct
  source 1..1344: mol_type = other DNA; note = Keap1-(GS)6-VL12.3 nucleic acid
cagccagatcccaggcctagcggggctggggcctgctgccgattcctgcccctgcagtcacagtgccctgagggggcaggggacgcggtgatgtacgcctccactgagtgcaaggcggaggtgacgccctcccagcatggcaaccgcaccttcagctacaccctggaggatcataccaagcaggcctttggcatcatgaacgagctgcggctcagccagcagctgtgtgacgtcacactgcaggtcaagtaccaggatgcaccggccgcccagttcatggcccacaaggtggtgctggcctcatccagccctgtcttcaaggccatgttcaccaacgggctgcgggagcagggcatggaggtggtgtccattgagggtatccaccccaaggtcatggagcgcctcattgaattcgcctacacggcctccatctccatgggcgagaagtgtgtcctccacgtcatgaacggtgctgtcatgtaccagatcgacagcgttgtccgtgcctgcagtgacttcctggtgcagcagctggaccccagcaatgccatcggcatcgccaacttcgctgagcagattggctgtgtggagttgcaccagcgtgcccgggagtacatctacatgcattttggggaggtggccaagcaagaggagttcttcaacctgtcccactgccaactggtgaccctcatcagccgggacgacctgaacgtgcgctgcgagtccgaggtcttccacgcctgcatcaactgggtcaagtacgactgcgaacagcgacggttctacgtccaggcgctgctgcgggccgtgcgctgccactcgttgacgccgaacttcctgcagatgcagctgcagaagtgcgagatcctgcagtccgactcccgctgcaaggactacctggtcaagatcttcgaggagctcaccctgcacaagcccacgcaggtgatgccctgccgggcgcccggcagcggcagcggcagcggcagcggcagcggcagcggcagccaacctgtgctgacacagagccccagcgtgtccgccgctcctcggcagcgggtgaccatcagcgtgtccggctctaatagcaacatcggctccaacaccgtgaactggatccagcagctgcctggaagagcccccgagctgctgatgtacgacgacgacctgctcgccccaggcgtgtctgatagattcagcggctctagaagcggcaccagcgccagcctgaccatcagcggactgcagtctgaagatgaggccgactactacgccgctacatgggacgatagcctgaacggctgggtgttcggcggcggaacaaaggtgaccgtcctgagcggctaa

SEQ ID NO: 1662 - DNA, 1362 bp, synthetic construct
  source 1..1362: mol_type = other DNA; note = HA-Keap1-(GS)1-VL12.3 nucleic acid
atgtacccatacgatgttccagattacgctggcagcggcagcggcagccagccagatcccaggcctagcggggctggggcctgctgccgattcctgcccctgcagtcacagtgccctgagggggcaggggacgcggtgatgtacgcctccactgagtgcaaggcggaggtgacgccctcccagcatggcaaccgcaccttcagctacaccctggaggatcataccaagcaggcctttggcatcatgaacgagctgcggctcagccagcagctgtgtgacgtcacactgcaggtcaagtaccaggatgcaccggccgcccagttcatggcccacaaggtggtgctggcctcatccagccctgtcttcaaggccatgttcaccaacgggctgcgggagcagggcatggaggtggtgtccattgagggtatccaccccaaggtcatggagcgcctcattgaattcgcctacacggcctccatctccatgggcgagaagtgtgtcctccacgtcatgaacggtgctgtcatgtaccagatcgacagcgttgtccgtgcctgcagtgacttcctggtgcagcagctggaccccagcaatgccatcggcatcgccaacttcgctgagcagattggctgtgtggagttgcaccagcgtgcccgggagtacatctacatgcattttggggaggtggccaagcaagaggagttcttcaacctgtcccactgccaactggtgaccctcatcagccgggacgacctgaacgtgcgctgcgagtccgaggtcttccacgcctgcatcaactgggtcaagtacgactgcgaacagcgacggttctacgtccaggcgctgctgcgggccgtgcgctgccactcgttgacgccgaacttcctgcagatgcagctgcagaagtgcgagatcctgcagtccgactcccgctgcaaggactacctggtcaagatcttcgaggagctcaccctgcacaagcccacgcaggtgatgccctgccgggcgcccggcagcggcagccaacctgtgctgacacagagccccagcgtgtccgccgctcctcggcagcgggtgaccatcagcgtgtccggctctaatagcaacatcggctccaacaccgtgaactggatccagcagctgcctggaagagcccccgagctgctgatgtacgacgacgacctgctcgccccaggcgtgtctgatagattcagcggctctagaagcggcaccagcgccagcctgaccatcagcggactgcagtctgaagatgaggccgactactacgccgctacatgggacgatagcctgaacggctgggtgttcggcggcggaacaaaggtgaccgtcctgagcggctaa

SEQ ID NO: 1663 - DNA, 1368 bp, synthetic construct
  source 1..1368: mol_type = other DNA; note = HA-Keap1-(GS)2-VL12.3 nucleic acid
atgtacccatacgatgttccagattacgctggcagcggcagcggcagccagccagatcccaggcctagcggggctggggcctgctgccgattcctgcccctgcagtcacagtgccctgagggggcaggggacgcggtgatgtacgcctccactgagtgcaaggcggaggtgacgccctcccagcatggcaaccgcaccttcagctacaccctggaggatcataccaagcaggcctttggcatcatgaacgagctgcggctcagccagcagctgtgtgacgtcacactgcaggtcaagtaccaggatgcaccggccgcccagttcatggcccacaaggtggtgctggcctcatccagccctgtcttcaaggccatgttcaccaacgggctgcgggagcagggcatggaggtggtgtccattgagggtatccaccccaaggtcatggagcgcctcattgaattcgcctacacggcctccatctccatgggcgagaagtgtgtcctccacgtcatgaacggtgctgtcatgtaccagatcgacagcgttgtccgtgcctgcagtgacttcctggtgcagcagctggaccccagcaatgccatcggcatcgccaacttcgctgagcagattggctgtgtggagttgcaccagcgtgcccgggagtacatctacatgcattttggggaggtggccaagcaagaggagttcttcaacctgtcccactgccaactggtgaccctcatcagccgggacgacctgaacgtgcgctgcgagtccgaggtcttccacgcctgcatcaactgggtcaagtacgactgcgaacagcgacggttctacgtccaggcgctgctgcgggccgtgcgctgccactcgttgacgccgaacttcctgcagatgcagctgcagaagtgcgagatcctgcagtccgactcccgctgcaaggactacctggtcaagatcttcgaggagctcaccctgcacaagcccacgcaggtgatgccctgccgggcgcccggcagcggcagcggcagccaacctgtgctgacacagagccccagcgtgtccgccgctcctcggcagcgggtgaccatcagcgtgtccggctctaatagcaacatcggctccaacaccgtgaactggatccagcagctgcctggaagagcccccgagctgctgatgtacgacgacgacctgctcgccccaggcgtgtctgatagattcagcggctctagaagcggcaccagcgccagcctgaccatcagcggactgcagtctgaagatgaggccgactactacgccgctacatgggacgatagcctgaacggctgggtgttcggcggcggaacaaaggtgaccgtcctgagcggctaa

SEQ ID NO: 1664 - DNA, 1374 bp, synthetic construct
  source 1..1374: mol_type = other DNA; note = HA-Keap1-(GS)3-VL12.3 nucleic acid
atgtacccatacgatgttccagattacgctggcagcggcagcggcagccagccagatcccaggcctagcggggctggggcctgctgccgattcctgcccctgcagtcacagtgccctgagggggcaggggacgcggtgatgtacgcctccactgagtgcaaggcggaggtgacgccctcccagcatggcaaccgcaccttcagctacaccctggaggatcataccaagcaggcctttggcatcatgaacgagctgcggctcagccagcagctgtgtgacgtcacactgcaggtcaagtaccaggatgcaccggccgcccagttcatggcccacaaggtggtgctggcctcatccagccctgtcttcaaggccatgttcaccaacgggctgcgggagcagggcatggaggtggtgtccattgagggtatccaccccaaggtcatggagcgcctcattgaattcgcctacacggcctccatctccatgggcgagaagtgtgtcctccacgtcatgaacggtgctgtcatgtaccagatcgacagcgttgtccgtgcctgcagtgacttcctggtgcagcagctggaccccagcaatgccatcggcatcgccaacttcgctgagcagattggctgtgtggagttgcaccagcgtgcccgggagtacatctacatgcattttggggaggtggccaagcaagaggagttcttcaacctgtcccactgccaactggtgaccctcatcagccgggacgacctgaacgtgcgctgcgagtccgaggtcttccacgcctgcatcaactgggtcaagtacgactgcgaacagcgacggttctacgtccaggcgctgctgcgggccgtgcgctgccactcgttgacgccgaacttcctgcagatgcagctgcagaagtgcgagatcctgcagtccgactcccgctgcaaggactacctggtcaagatcttcgaggagctcaccctgcacaagcccacgcaggtgatgccctgccgggcgcccggcagcggcagcggcagcggcagccaacctgtgctgacacagagccccagcgtgtccgccgctcctcggcagcgggtgaccatcagcgtgtccggctctaatagcaacatcggctccaacaccgtgaactggatccagcagctgcctggaagagcccccgagctgctgatgtacgacgacgacctgctcgccccaggcgtgtctgatagattcagcggctctagaagcggcaccagcgccagcctgaccatcagcggactgcagtctgaagatgaggccgactactacgccgctacatgggacgatagcctgaacggctgggtgttcggcggcggaacaaaggtgaccgtcctgagcggctaa

SEQ ID NO: 1665 - DNA, 1380 bp, synthetic construct
  source 1..1380: mol_type = other DNA; note = HA-Keap1-(GS)4-VL12.3 nucleic acid
atgtacccatacgatgttccagattacgctggcagcggcagcggcagccagccagatcccaggcctagcggggctggggcctgctgccgattcctgcccctgcagtcacagtgccctgagggggcaggggacgcggtgatgtacgcctccactgagtgcaaggcggaggtgacgccctcccagcatggcaaccgcaccttcagctacaccctggaggatcataccaagcaggcctttggcatcatgaacgagctgcggctcagccagcagctgtgtgacgtcacactgcaggtcaagtaccaggatgcaccggccgcccagttcatggcccacaaggtggtgctggcctcatccagccctgtcttcaaggccatgttcaccaacgggctgcgggagcagggcatggaggtggtgtccattgagggtatccaccccaaggtcatggagcgcctcattgaattcgcctacacggcctccatctccatgggcgagaagtgtgtcctccacgtcatgaacggtgctgtcatgtaccagatcgacagcgttgtccgtgcctgcagtgacttcctggtgcagcagctggaccccagcaatgccatcggcatcgccaacttcgctgagcagattggctgtgtggagttgcaccagcgtgcccgggagtacatctacatgcattttggggaggtggccaagcaagaggagttcttcaacctgtcccactgccaactggtgaccctcatcagccgggacgacctgaacgtgcgctgcgagtccgaggtcttccacgcctgcatcaactgggtcaagtacgactgcgaacagcgacggttctacgtccaggcgctgctgcgggccgtgcgctgccactcgttgacgccgaacttcctgcagatgcagctgcagaagtgcgagatcctgcagtccgactcccgctgcaaggactacctggtcaagatcttcgaggagctcaccctgcacaagcccacgcaggtgatgccctgccgggcgcccggcagcggcagcggcagcggcagcggcagccaacctgtgctgacacagagccccagcgtgtccgccgctcctcggcagcgggtgaccatcagcgtgtccggctctaatagcaacatcggctccaacaccgtgaactggatccagcagctgcctggaagagcccccgagctgctgatgtacgacgacgacctgctcgccccaggcgtgtctgatagattcagcggctctagaagcggcaccagcgccagcctgaccatcagcggactgcagtctgaagatgaggccgactactacgccgctacatgggacgatagcctgaacggctgggtgttcggcggcggaacaaaggtgaccgtcctgagcggctaa

SEQ ID NO: 1666 - DNA, 1386 bp, synthetic construct
  source 1..1386: mol_type = other DNA; note = HA-Keap1-(GS)5-VL12.3 nucleic acid
atgtacccatacgatgttccagattacgctggcagcggcagcggcagccagccagatcccaggcctagcggggctggggcctgctgccgattcctgcccctgcagtcacagtgccctgagggggcaggggacgcggtgatgtacgcctccactgagtgcaaggcggaggtgacgccctcccagcatggcaaccgcaccttcagctacaccctggaggatcataccaagcaggcctttggcatcatgaacgagctgcggctcagccagcagctgtgtgacgtcacactgcaggtcaagtaccaggatgcaccggccgcccagttcatggcccacaaggtggtgctggcctcatccagccctgtcttcaaggccatgttcaccaacgggctgcgggagcagggcatggaggtggtgtccattgagggtatccaccccaaggtcatggagcgcctcattgaattcgcctacacggcctccatctccatgggcgagaagtgtgtcctccacgtcatgaacggtgctgtcatgtaccagatcgacagcgttgtccgtgcctgcagtgacttcctggtgcagcagctggaccccagcaatgccatcggcatcgccaacttcgctgagcagattggctgtgtggagttgcaccagcgtgcccgggagtacatctacatgcattttggggaggtggccaagcaagaggagttcttcaacctgtcccactgccaactggtgaccctcatcagccgggacgacctgaacgtgcgctgcgagtccgaggtcttccacgcctgcatcaactgggtcaagtacgactgcgaacagcgacggttctacgtccaggcgctgctgcgggccgtgcgctgccactcgttgacgccgaacttcctgcagatgcagctgcagaagtgcgagatcctgcagtccgactcccgctgcaaggactacctggtcaagatcttcgaggagctcaccctgcacaagcccacgcaggtgatgccctgccgggcgcccggcagcggcagcggcagcggcagcggcagcggcagccaacctgtgctgacacagagccccagcgtgtccgccgctcctcggcagcgggtgaccatcagcgtgtccggctctaatagcaacatcggctccaacaccgtgaactggatccagcagctgcctggaagagcccccgagctgctgatgtacgacgacgacctgctcgccccaggcgtgtctgatagattcagcggctctagaagcggcaccagcgccagcctgaccatcagcggactgcagtctgaagatgaggccgactactacgccgctacatgggacgatagcctgaacggctgggtgttcggcggcggaacaaaggtgaccgtcctgagcggctaa

SEQ ID NO: 1667 - DNA, 1392 bp, synthetic construct
  source 1..1392: mol_type = other DNA; note = HA-Keap1-(GS)6-VL12.3 nucleic acid
atgtacccatacgatgttccagattacgctggcagcggcagcggcagccagccagatcccaggcctagcggggctggggcctgctgccgattcctgcccctgcagtcacagtgccctgagggggcaggggacgcggtgatgtacgcctccactgagtgcaaggcggaggtgacgccctcccagcatggcaaccgcaccttcagctacaccctggaggatcataccaagcaggcctttggcatcatgaacgagctgcggctcagccagcagctgtgtgacgtcacactgcaggtcaagtaccaggatgcaccggccgcccagttcatggcccacaaggtggtgctggcctcatccagccctgtcttcaaggccatgttcaccaacgggctgcgggagcagggcatggaggtggtgtccattgagggtatccaccccaaggtcatggagcgcctcattgaattcgcctacacggcctccatctccatgggcgagaagtgtgtcctccacgtcatgaacggtgctgtcatgtaccagatcgacagcgttgtccgtgcctgcagtgacttcctggtgcagcagctggaccccagcaatgccatcggcatcgccaacttcgctgagcagattggctgtgtggagttgcaccagcgtgcccgggagtacatctacatgcattttggggaggtggccaagcaagaggagttcttcaacctgtcccactgccaactggtgaccctcatcagccgggacgacctgaacgtgcgctgcgagtccgaggtcttccacgcctgcatcaactgggtcaagtacgactgcgaacagcgacggttctacgtccaggcgctgctgcgggccgtgcgctgccactcgttgacgccgaacttcctgcagatgcagctgcagaagtgcgagatcctgcagtccgactcccgctgcaaggactacctggtcaagatcttcgaggagctcaccctgcacaagcccacgcaggtgatgccctgccgggcgcccggcagcggcagcggcagcggcagcggcagcggcagcggcagccaacctgtgctgacacagagccccagcgtgtccgccgctcctcggcagcgggtgaccatcagcgtgtccggctctaatagcaacatcggctccaacaccgtgaactggatccagcagctgcctggaagagcccccgagctgctgatgtacgacgacgacctgctcgccccaggcgtgtctgatagattcagcggctctagaagcggcaccagcgccagcctgaccatcagcggactgcagtctgaagatgaggccgactactacgccgctacatgggacgatagcctgaacggctgggtgttcggcggcggaacaaaggtgaccgtcctgagcggctaa

SEQ ID NO: 1668 - DNA, 732 bp, synthetic construct
  source 1..732: mol_type = other DNA; note = RNF125-(GS)1-VL12.3 nucleic acid
ggctccgtgctgagcaccgacagcggcaaatcggcgcccgcctctgccaccgcgcgggccctggagcgcaggagggacccggagttgcccgtcacgtccttcgactgcgccgtgtgccttgaggtgttacaccagcctgtccggacccgctgcggccacgtattctgccgttcctgtattgctaccagtctgaagaacaacaagtggacctgtccttattgccgggcatatcttccttcagaaggagttccagcaactgatgtagccaaaagaatgaaatcagagtataagaactgcgctgagtgtgacaccctggtttgcctcagtgaaatgagggcacatattcggacttgtcagaagtacatagataagtatggaccaggcagcggcagccaacctgtgctgacacagagccccagcgtgtccgccgctcctcggcagcgggtgaccatcagcgtgtccggctctaatagcaacatcggctccaacaccgtgaactggatccagcagctgcctggaagagcccccgagctgctgatgtacgacgacgacctgctcgccccaggcgtgtctgatagattcagcggctctagaagcggcaccagcgccagcctgaccatcagcggactgcagtctgaagatgaggccgactactacgccgctacatgggacgatagcctgaacggctgggtgttcggcggcggaacaaaggtgaccgtcctgagcggctaa

SEQ ID NO: 1669 - DNA, 738 bp, synthetic construct
  source 1..738: mol_type = other DNA; note = RNF125-(GS)2-VL12.3 nucleic acid
ggctccgtgctgagcaccgacagcggcaaatcggcgcccgcctctgccaccgcgcgggccctggagcgcaggagggacccggagttgcccgtcacgtccttcgactgcgccgtgtgccttgaggtgttacaccagcctgtccggacccgctgcggccacgtattctgccgttcctgtattgctaccagtctgaagaacaacaagtggacctgtccttattgccgggcatatcttccttcagaaggagttccagcaactgatgtagccaaaagaatgaaatcagagtataagaactgcgctgagtgtgacaccctggtttgcctcagtgaaatgagggcacatattcggacttgtcagaagtacatagataagtatggaccaggcagcggcagcggcagccaacctgtgctgacacagagccccagcgtgtccgccgctcctcggcagcgggtgaccatcagcgtgtccggctctaatagcaacatcggctccaacaccgtgaactggatccagcagctgcctggaagagcccccgagctgctgatgtacgacgacgacctgctcgccccaggcgtgtctgatagattcagcggctctagaagcggcaccagcgccagcctgaccatcagcggactgcagtctgaagatgaggccgactactacgccgctacatgggacgatagcctgaacggctgggtgttcggcggcggaacaaaggtgaccgtcctgagcggctaa

SEQ ID NO: 1670 - DNA, 744 bp, synthetic construct
  source 1..744: mol_type = other DNA; note = RNF125-(GS)3-VL12.3 nucleic acid
ggctccgtgctgagcaccgacagcggcaaatcggcgcccgcctctgccaccgcgcgggccctggagcgcaggagggacccggagttgcccgtcacgtccttcgactgcgccgtgtgccttgaggtgttacaccagcctgtccggacccgctgcggccacgtattctgccgttcctgtattgctaccagtctgaagaacaacaagtggacctgtccttattgccgggcatatcttccttcagaaggagttccagcaactgatgtagccaaaagaatgaaatcagagtataagaactgcgctgagtgtgacaccctggtttgcctcagtgaaatgagggcacatattcggacttgtcagaagtacatagataagtatggaccaggcagcggcagcggcagcggcagccaacctgtgctgacacagagccccagcgtgtccgccgctcctcggcagcgggtgaccatcagcgtgtccggctctaatagcaacatcggctccaacaccgtgaactggatccagcagctgcctggaagagcccccgagctgctgatgtacgacgacgacctgctcgccccaggcgtgtctgatagattcagcggctctagaagcggcaccagcgccagcctgaccatcagcggactgcagtctgaagatgaggccgactactacgccgctacatgggacgatagcctgaacggctgggtgttcggcggcggaacaaaggtgaccgtcctgagcggctaa

SEQ ID NO: 1671 - DNA, 750 bp, synthetic construct
  source 1..750: mol_type = other DNA; note = RNF125-(GS)4-VL12.3 nucleic acid
ggctccgtgctgagcaccgacagcggcaaatcggcgcccgcctctgccaccgcgcgggccctggagcgcaggagggacccggagttgcccgtcacgtccttcgactgcgccgtgtgccttgaggtgttacaccagcctgtccggacccgctgcggccacgtattctgccgttcctgtattgctaccagtctgaagaacaacaagtggacctgtccttattgccgggcatatcttccttcagaaggagttccagcaactgatgtagccaaaagaatgaaatcagagtataagaactgcgctgagtgtgacaccctggtttgcctcagtgaaatgagggcacatattcggacttgtcagaagtacatagataagtatggaccaggcagcggcagcggcagcggcagcggcagccaacctgtgctgacacagagccccagcgtgtccgccgctcctcggcagcgggtgaccatcagcgtgtccggctctaatagcaacatcggctccaacaccgtgaactggatccagcagctgcctggaagagcccccgagctgctgatgtacgacgacgacctgctcgccccaggcgtgtctgatagattcagcggctctagaagcggcaccagcgccagcctgaccatcagcggactgcagtctgaagatgaggccgactactacgccgctacatgggacgatagcctgaacggctgggtgttcggcggcggaacaaaggtgaccgtcctgagcggctaa

SEQ ID NO: 1672 - DNA, 756 bp, synthetic construct
  source 1..756: mol_type = other DNA; note = RNF125-(GS)5-VL12.3 nucleic acid
ggctccgtgctgagcaccgacagcggcaaatcggcgcccgcctctgccaccgcgcgggccctggagcgcaggagggacccggagttgcccgtcacgtccttcgactgcgccgtgtgccttgaggtgttacaccagcctgtccggacccgctgcggccacgtattctgccgttcctgtattgctaccagtctgaagaacaacaagtggacctgtccttattgccgggcatatcttccttcagaaggagttccagcaactgatgtagccaaaagaatgaaatcagagtataagaactgcgctgagtgtgacaccctggtttgcctcagtgaaatgagggcacatattcggacttgtcagaagtacatagataagtatggaccaggcagcggcagcggcagcggcagcggcagcggcagccaacctgtgctgacacagagccccagcgtgtccgccgctcctcggcagcgggtgaccatcagcgtgtccggctctaatagcaacatcggctccaacaccgtgaactggatccagcagctgcctggaagagcccccgagctgctgatgtacgacgacgacctgctcgccccaggcgtgtctgatagattcagcggctctagaagcggcaccagcgccagcctgaccatcagcggactgcagtctgaagatgaggccgactactacgccgctacatgggacgatagcctgaacggctgggtgttcggcggcggaacaaaggtgaccgtcctgagcggctaa

SEQ ID NO: 1673 - DNA, 762 bp, synthetic construct
  source 1..762: mol_type = other DNA; note = RNF125-(GS)6-VL12.3 nucleic acid
ggctccgtgctgagcaccgacagcggcaaatcggcgcccgcctctgccaccgcgcgggccctggagcgcaggagggacccggagttgcccgtcacgtccttcgactgcgccgtgtgccttgaggtgttacaccagcctgtccggacccgctgcggccacgtattctgccgttcctgtattgctaccagtctgaagaacaacaagtggacctgtccttattgccgggcatatcttccttcagaaggagttccagcaactgatgtagccaaaagaatgaaatcagagtataagaactgcgctgagtgtgacaccctggtttgcctcagtgaaatgagggcacatattcggacttgtcagaagtacatagataagtatggaccaggcagcggcagcggcagcggcagcggcagcggcagcggcagccaacctgtgctgacacagagccccagcgtgtccgccgctcctcggcagcgggtgaccatcagcgtgtccggctctaatagcaacatcggctccaacaccgtgaactggatccagcagctgcctggaagagcccccgagctgctgatgtacgacgacgacctgctcgccccaggcgtgtctgatagattcagcggctctagaagcggcaccagcgccagcctgaccatcagcggactgcagtctgaagatgaggccgactactacgccgctacatgggacgatagcctgaacggctgggtgttcggcggcggaacaaaggtgaccgtcctgagcggctaa

SEQ ID NO: 1674 - DNA, 780 bp, synthetic construct
  source 1..780: mol_type = other DNA; note = HA-RNF125-(GS)1-VL12.3 nucleic acid
atgtacccatacgatgttccagattacgctggcagcggcagcggcagcggctccgtgctgagcaccgacagcggcaaatcggcgcccgcctctgccaccgcgcgggccctggagcgcaggagggacccggagttgcccgtcacgtccttcgactgcgccgtgtgccttgaggtgttacaccagcctgtccggacccgctgcggccacgtattctgccgttcctgtattgctaccagtctgaagaacaacaagtggacctgtccttattgccgggcatatcttccttcagaaggagttccagcaactgatgtagccaaaagaatgaaatcagagtataagaactgcgctgagtgtgacaccctggtttgcctcagtgaaatgagggcacatattcggacttgtcagaagtacatagataagtatggaccaggcagcggcagccaacctgtgctgacacagagccccagcgtgtccgccgctcctcggcagcgggtgaccatcagcgtgtccggctctaatagcaacatcggctccaacaccgtgaactggatccagcagctgcctggaagagcccccgagctgctgatgtacgacgacgacctgctcgccccaggcgtgtctgatagattcagcggctctagaagcggcaccagcgccagcctgaccatcagcggactgcagtctgaagatgaggccgactactacgccgctacatgggacgatagcctgaacggctgggtgttcggcggcggaacaaaggtgaccgtcctgagcggctaa

SEQ ID NO: 1675 - DNA, 786 bp, synthetic construct
  source 1..786: mol_type = other DNA; note = HA-RNF125-(GS)2-VL12.3 nucleic acid
atgtacccatacgatgttccagattacgctggcagcggcagcggcagcggctccgtgctgagcaccgacagcggcaaatcggcgcccgcctctgccaccgcgcgggccctggagcgcaggagggacccggagttgcccgtcacgtccttcgactgcgccgtgtgccttgaggtgttacaccagcctgtccggacccgctgcggccacgtattctgccgttcctgtattgctaccagtctgaagaacaacaagtggacctgtccttattgccgggcatatcttccttcagaaggagttccagcaactgatgtagccaaaagaatgaaatcagagtataagaactgcgctgagtgtgacaccctggtttgcctcagtgaaatgagggcacatattcggacttgtcagaagtacatagataagtatggaccaggcagcggcagcggcagccaacctgtgctgacacagagccccagcgtgtccgccgctcctcggcagcgggtgaccatcagcgtgtccggctctaatagcaacatcggctccaacaccgtgaactggatccagcagctgcctggaagagcccccgagctgctgatgtacgacgacgacctgctcgccccaggcgtgtctgatagattcagcggctctagaagcggcaccagcgccagcctgaccatcagcggactgcagtctgaagatgaggccgactactacgccgctacatgggacgatagcctgaacggctgggtgttcggcggcggaacaaaggtgaccgtcctgagcggctaa

SEQ ID NO: 1676 - DNA, 792 bp, synthetic construct
  source 1..792: mol_type = other DNA; note = HA-RNF125-(GS)3-VL12.3 nucleic acid
atgtacccatacgatgttccagattacgctggcagcggcagcggcagcggctccgtgctgagcaccgacagcggcaaatcggcgcccgcctctgccaccgcgcgggccctggagcgcaggagggacccggagttgcccgtcacgtccttcgactgcgccgtgtgccttgaggtgttacaccagcctgtccggacccgctgcggccacgtattctgccgttcctgtattgctaccagtctgaagaacaacaagtggacctgtccttattgccgggcatatcttccttcagaaggagttccagcaactgatgtagccaaaagaatgaaatcagagtataagaactgcgctgagtgtgacaccctggtttgcctcagtgaaatgagggcacatattcggacttgtcagaagtacatagataagtatggaccaggcagcggcagcggcagcggcagccaacctgtgctgacacagagccccagcgtgtccgccgctcctcggcagcgggtgaccatcagcgtgtccggctctaatagcaacatcggctccaacaccgtgaactggatccagcagctgcctggaagagcccccgagctgctgatgtacgacgacgacctgctcgccccaggcgtgtctgatagattcagcggctctagaagcggcaccagcgccagcctgaccatcagcggactgcagtctgaagatgaggccgactactacgccgctacatgggacgatagcctgaacggctgggtgttcggcggcggaacaaaggtgaccgtcctgagcggctaa

SEQ ID NO: 1677 - DNA, 798 bp, synthetic construct
  source 1..798: mol_type = other DNA; note = HA-RNF125-(GS)4-VL12.3 nucleic acid
atgtacccatacgatgttccagattacgctggcagcggcagcggcagcggctccgtgctgagcaccgacagcggcaaatcggcgcccgcctctgccaccgcgcgggccctggagcgcaggagggacccggagttgcccgtcacgtccttcgactgcgccgtgtgccttgaggtgttacaccagcctgtccggacccgctgcggccacgtattctgccgttcctgtattgctaccagtctgaagaacaacaagtggacctgtccttattgccgggcatatcttccttcagaaggagttccagcaactgatgtagccaaaagaatgaaatcagagtataagaactgcgctgagtgtgacaccctggtttgcctcagtgaaatgagggcacatattcggacttgtcagaagtacatagataagtatggaccaggcagcggcagcggcagcggcagcggcagccaacctgtgctgacacagagccccagcgtgtccgccgctcctcggcagcgggtgaccatcagcgtgtccggctctaatagcaacatcggctccaacaccgtgaactggatccagcagctgcctggaagagcccccgagctgctgatgtacgacgacgacctgctcgccccaggcgtgtctgatagattcagcggctctagaagcggcaccagcgccagcctgaccatcagcggactgcagtctgaagatgaggccgactactacgccgctacatgggacgatagcctgaacggctgggtgttcggcggcggaacaaaggtgaccgtcctgagcggctaa

SEQ ID NO: 1678 - DNA, 804 bp, synthetic construct
  source 1..804: mol_type = other DNA; note = HA-RNF125-(GS)5-VL12.3 nucleic acid
atgtacccatacgatgttccagattacgctggcagcggcagcggcagcggctccgtgctgagcaccgacagcggcaaatcggcgcccgcctctgccaccgcgcgggccctggagcgcaggagggacccggagttgcccgtcacgtccttcgactgcgccgtgtgccttgaggtgttacaccagcctgtccggacccgctgcggccacgtattctgccgttcctgtattgctaccagtctgaagaacaacaagtggacctgtccttattgccgggcatatcttccttcagaaggagttccagcaactgatgtagccaaaagaatgaaatcagagtataagaactgcgctgagtgtgacaccctggtttgcctcagtgaaatgagggcacatattcggacttgtcagaagtacatagataagtatggaccaggcagcggcagcggcagcggcagcggcagcggcagccaacctgtgctgacacagagccccagcgtgtccgccgctcctcggcagcgggtgaccatcagcgtgtccggctctaatagcaacatcggctccaacaccgtgaactggatccagcagctgcctggaagagcccccgagctgctgatgtacgacgacgacctgctcgccccaggcgtgtctgatagattcagcggctctagaagcggcaccagcgccagcctgaccatcagcggactgcagtctgaagatgaggccgactactacgccgctacatgggacgatagcctgaacggctgggtgttcggcggcggaacaaaggtgaccgtcctgagcggctaa

SEQ ID NO: 1679 - DNA, 810 bp, synthetic construct
  source 1..810: mol_type = other DNA; note = HA-RNF125-(GS)6-VL12.3 nucleic acid
atgtacccatacgatgttccagattacgctggcagcggcagcggcagcggctccgtgctgagcaccgacagcggcaaatcggcgcccgcctctgccaccgcgcgggccctggagcgcaggagggacccggagttgcccgtcacgtccttcgactgcgccgtgtgccttgaggtgttacaccagcctgtccggacccgctgcggccacgtattctgccgttcctgtattgctaccagtctgaagaacaacaagtggacctgtccttattgccgggcatatcttccttcagaaggagttccagcaactgatgtagccaaaagaatgaaatcagagtataagaactgcgctgagtgtgacaccctggtttgcctcagtgaaatgagggcacatattcggacttgtcagaagtacatagataagtatggaccaggcagcggcagcggcagcggcagcggcagcggcagcggcagccaacctgtgctgacacagagccccagcgtgtccgccgctcctcggcagcgggtgaccatcagcgtgtccggctctaatagcaacatcggctccaacaccgtgaactggatccagcagctgcctggaagagcccccgagctgctgatgtacgacgacgacctgctcgccccaggcgtgtctgatagattcagcggctctagaagcggcaccagcgccagcctgaccatcagcggactgcagtctgaagatgaggccgactactacgccgctacatgggacgatagcctgaacggctgggtgttcggcggcggaacaaaggtgaccgtcctgagcggctaa

SEQ ID NO: 1680 - DNA, 711 bp, synthetic construct
  source 1..711: mol_type = other DNA; note = TCF4-(GS)1-CHIP-NLS nucleic acid
atggatgacctaggcgccaacgacgaactgatttccttcaaagacgagggcgaacaggaggagaagagctccgaaaactcctcggcagagagggatttagctgatgtcaaatcgtctctagtcaatgaatcagaaacgggcagccggctgaacttcggggacgacatccccagcgctcttcgaatcgcgaagaagaagcgctggaacagcattgaggagcggcgcatccaccaggagagcgagctgcactcctacctctccaggctcattgccgcggagcgtgagagggagctggaagagtgccagcgaaaccacgagggtgatgaggacgacagccacgtccgggcccagcaggcctgcattgaggccaagcacgacaagtacatggcggacatggacgagcttttttctcaggtggatgagaagaggaagaagcgagacatccccgactacctgtgtggcaagatcagctttgagctgatgcgggagccgtgcatcacgcccagtggcatcacctacgaccgcaaggacatcgaggagcacctgcagcgtgtgggtcattttgacccggtgaccaggagccccctgacccaggaacagctcatccccaacttggctatgaaggaggttattgacgcattcatctctgagaatggctgggtggaggactacggcagcggcagcccggcggcgaaacgcgtgaaactggat

SEQ ID NO: 1681 - DNA, 717 bp, synthetic construct
  source 1..717: mol_type = other DNA; note = TCF4-(GS)2-CHIP-NLS nucleic acid
atggatgacctaggcgccaacgacgaactgatttccttcaaagacgagggcgaacaggaggagaagagctccgaaaactcctcggcagagagggatttagctgatgtcaaatcgtctctagtcaatgaatcagaaacgggcagcggcagccggctgaacttcggggacgacatccccagcgctcttcgaatcgcgaagaagaagcgctggaacagcattgaggagcggcgcatccaccaggagagcgagctgcactcctacctctccaggctcattgccgcggagcgtgagagggagctggaagagtgccagcgaaaccacgagggtgatgaggacgacagccacgtccgggcccagcaggcctgcattgaggccaagcacgacaagtacatggcggacatggacgagcttttttctcaggtggatgagaagaggaagaagcgagacatccccgactacctgtgtggcaagatcagctttgagctgatgcgggagccgtgcatcacgcccagtggcatcacctacgaccgcaaggacatcgaggagcacctgcagcgtgtgggtcattttgacccggtgaccaggagccccctgacccaggaacagctcatccccaacttggctatgaaggaggttattgacgcattcatctctgagaatggctgggtggaggactacggcagcggcagcccggcggcgaaacgcgtgaaactggat

SEQ ID NO: 1682 - DNA, 723 bp, synthetic construct
  source 1..723: mol_type = other DNA; note = TCF4-(GS)3-CHIP-NLS nucleic acid
atggatgacctaggcgccaacgacgaactgatttccttcaaagacgagggcgaacaggaggagaagagctccgaaaactcctcggcagagagggatttagctgatgtcaaatcgtctctagtcaatgaatcagaaacgggcagcggcagcggcagccggctgaacttcggggacgacatccccagcgctcttcgaatcgcgaagaagaagcgctggaacagcattgaggagcggcgcatccaccaggagagcgagctgcactcctacctctccaggctcattgccgcggagcgtgagagggagctggaagagtgccagcgaaaccacgagggtgatgaggacgacagccacgtccgggcccagcaggcctgcattgaggccaagcacgacaagtacatggcggacatggacgagcttttttctcaggtggatgagaagaggaagaagcgagacatccccgactacctgtgtggcaagatcagctttgagctgatgcgggagccgtgcatcacgcccagtggcatcacctacgaccgcaaggacatcgaggagcacctgcagcgtgtgggtcattttgacccggtgaccaggagccccctgacccaggaacagctcatccccaacttggctatgaaggaggttattgacgcattcatctctgagaatggctgggtggaggactacggcagcggcagcccggcggcgaaacgcgtgaaactggat

SEQ ID NO: 1683 - DNA, 729 bp, synthetic construct
  source 1..729: mol_type = other DNA; note = TCF4-(GS)4-CHIP-NLS nucleic acid
atggatgacctaggcgccaacgacgaactgatttccttcaaagacgagggcgaacaggaggagaagagctccgaaaactcctcggcagagagggatttagctgatgtcaaatcgtctctagtcaatgaatcagaaacgggcagcggcagcggcagcggcagccggctgaacttcggggacgacatccccagcgctcttcgaatcgcgaagaagaagcgctggaacagcattgaggagcggcgcatccaccaggagagcgagctgcactcctacctctccaggctcattgccgcggagcgtgagagggagctggaagagtgccagcgaaaccacgagggtgatgaggacgacagccacgtccgggcccagcaggcctgcattgaggccaagcacgacaagtacatggcggacatggacgagcttttttctcaggtggatgagaagaggaagaagcgagacatccccgactacctgtgtggcaagatcagctttgagctgatgcgggagccgtgcatcacgcccagtggcatcacctacgaccgcaaggacatcgaggagcacctgcagcgtgtgggtcattttgacccggtgaccaggagccccctgacccaggaacagctcatccccaacttggctatgaaggaggttattgacgcattcatctctgagaatggctgggtggaggactacggcagcggcagcccggcggcgaaacgcgtgaaactggat

SEQ ID NO: 1684 - DNA, 735 bp, synthetic construct
  source 1..735: mol_type = other DNA; note = TCF4-(GS)5-CHIP-NLS nucleic acid
atggatgacctaggcgccaacgacgaactgatttccttcaaagacgagggcgaacaggaggagaagagctccgaaaactcctcggcagagagggatttagctgatgtcaaatcgtctctagtcaatgaatcagaaacgggcagcggcagcggcagcggcagcggcagccggctgaacttcggggacgacatccccagcgctcttcgaatcgcgaagaagaagcgctggaacagcattgaggagcggcgcatccaccaggagagcgagctgcactcctacctctccaggctcattgccgcggagcgtgagagggagctggaagagtgccagcgaaaccacgagggtgatgaggacgacagccacgtccgggcccagcaggcctgcattgaggccaagcacgacaagtacatggcggacatggacgagcttttttctcaggtggatgagaagaggaagaagcgagacatccccgactacctgtgtggcaagatcagctttgagctgatgcgggagccgtgcatcacgcccagtggcatcacctacgaccgcaaggacatcgaggagcacctgcagcgtgtgggtcattttgacccggtgaccaggagccccctgacccaggaacagctcatccccaacttggctatgaaggaggttattgacgcattcatctctgagaatggctgggtggaggactacggcagcggcagcccggcggcgaaacgcgtgaaactggat

SEQ ID NO: 1685 - DNA, 741 bp, synthetic construct
  source 1..741: mol_type = other DNA; note = TCF4-(GS)6-CHIP-NLS nucleic acid
atggatgacctaggcgccaacgacgaactgatttccttcaaagacgagggcgaacaggaggagaagagctccgaaaactcctcggcagagagggatttagctgatgtcaaatcgtctctagtcaatgaatcagaaacgggcagcggcagcggcagcggcagcggcagcggcagccggctgaacttcggggacgacatccccagcgctcttcgaatcgcgaagaagaagcgctggaacagcattgaggagcggcgcatccaccaggagagcgagctgcactcctacctctccaggctcattgccgcggagcgtgagagggagctggaagagtgccagcgaaaccacgagggtgatgaggacgacagccacgtccgggcccagcaggcctgcattgaggccaagcacgacaagtacatggcggacatggacgagcttttttctcaggtggatgagaagaggaagaagcgagacatccccgactacctgtgtggcaagatcagctttgagctgatgcgggagccgtgcatcacgcccagtggcatcacctacgaccgcaaggacatcgaggagcacctgcagcgtgtgggtcattttgacccggtgaccaggagccccctgacccaggaacagctcatccccaacttggctatgaaggaggttattgacgcattcatctctgagaatggctgggtggaggactacggcagcggcagcccggcggcgaaacgcgtgaaactggat

SEQ ID NO: 1686 - DNA, 741 bp, synthetic construct
  source 1..741: mol_type = other DNA; note = TCF4-(GS)1-CHIP-NLS-HA nucleic acid
atggatgacctaggcgccaacgacgaactgatttccttcaaagacgagggcgaacaggaggagaagagctccgaaaactcctcggcagagagggatttagctgatgtcaaatcgtctctagtcaatgaatcagaaacgggcagccggctgaacttcggggacgacatccccagcgctcttcgaatcgcgaagaagaagcgctggaacagcattgaggagcggcgcatccaccaggagagcgagctgcactcctacctctccaggctcattgccgcggagcgtgagagggagctggaagagtgccagcgaaaccacgagggtgatgaggacgacagccacgtccgggcccagcaggcctgcattgaggccaagcacgacaagtacatggcggacatggacgagcttttttctcaggtggatgagaagaggaagaagcgagacatccccgactacctgtgtggcaagatcagctttgagctgatgcgggagccgtgcatcacgcccagtggcatcacctacgaccgcaaggacatcgaggagcacctgcagcgtgtgggtcattttgacccggtgaccaggagccccctgacccaggaacagctcatccccaacttggctatgaaggaggttattgacgcattcatctctgagaatggctgggtggaggactacggcagcggcagcccggcggcgaaacgcgtgaaactggattacccatacgatgttccagattacgcttaa

SEQ ID NO: 1687 - DNA, 747 bp, synthetic construct
  source 1..747: mol_type = other DNA; note = TCF4-(GS)2-CHIP-NLS-HA nucleic acid
atggatgacctaggcgccaacgacgaactgatttccttcaaagacgagggcgaacaggaggagaagagctccgaaaactcctcggcagagagggatttagctgatgtcaaatcgtctctagtcaatgaatcagaaacgggcagcggcagccggctgaacttcggggacgacatccccagcgctcttcgaatcgcgaagaagaagcgctggaacagcattgaggagcggcgcatccaccaggagagcgagctgcactcctacctctccaggctcattgccgcggagcgtgagagggagctggaagagtgccagcgaaaccacgagggtgatgaggacgacagccacgtccgggcccagcaggcctgcattgaggccaagcacgacaagtacatggcggacatggacgagcttttttctcaggtggatgagaagaggaagaagcgagacatccccgactacctgtgtggcaagatcagctttgagctgatgcgggagccgtgcatcacgcccagtggcatcacctacgaccgcaaggacatcgaggagcacctgcagcgtgtgggtcattttgacccggtgaccaggagccccctgacccaggaacagctcatccccaacttggctatgaaggaggttattgacgcattcatctctgagaatggctgggtggaggactacggcagcggcagcccggcggcgaaacgcgtgaaactggattacccatacgatgttccagattacgcttaa

SEQ ID NO: 1688 - DNA, 753 bp, synthetic construct
  source 1..753: mol_type = other DNA; note = TCF4-(GS)3-CHIP-NLS-HA nucleic acid
atggatgacctaggcgccaacgacgaactgatttccttcaaagacgagggcgaacaggaggagaagagctccgaaaactcctcggcagagagggatttagctgatgtcaaatcgtctctagtcaatgaatcagaaacgggcagcggcagcggcagccggctgaacttcggggacgacatccccagcgctcttcgaatcgcgaagaagaagcgctggaacagcattgaggagcggcgcatccaccaggagagcgagctgcactcctacctctccaggctcattgccgcggagcgtgagagggagctggaagagtgccagcgaaaccacgagggtgatgaggacgacagccacgtccgggcccagcaggcctgcattgaggccaagcacgacaagtacatggcggacatggacgagcttttttctcaggtggatgagaagaggaagaagcgagacatccccgactacctgtgtggcaagatcagctttgagctgatgcgggagccgtgcatcacgcccagtggcatcacctacgaccgcaaggacatcgaggagcacctgcagcgtgtgggtcattttgacccggtgaccaggagccccctgacccaggaacagctcatccccaacttggctatgaaggaggttattgacgcattcatctctgagaatggctgggtggaggactacggcagcggcagcccggcggcgaaacgcgtgaaactggattacccatacgatgttccagattacgcttaa

SEQ ID NO: 1689 - DNA, 759 bp, synthetic construct
  source 1..759: mol_type = other DNA; note = TCF4-(GS)4-CHIP-NLS-HA nucleic acid
atggatgacctaggcgccaacgacgaactgatttccttcaaagacgagggcgaacaggaggagaagagctccgaaaactcctcggcagagagggatttagctgatgtcaaatcgtctctagtcaatgaatcagaaacgggcagcggcagcggcagcggcagccggctgaacttcggggacgacatccccagcgctcttcgaatcgcgaagaagaagcgctggaacagcattgaggagcggcgcatccaccaggagagcgagctgcactcctacctctccaggctcattgccgcggagcgtgagagggagctggaagagtgccagcgaaaccacgagggtgatgaggacgacagccacgtccgggcccagcaggcctgcattgaggccaagcacgacaagtacatggcggacatggacgagcttttttctcaggtggatgagaagaggaagaagcgagacatccccgactacctgtgtggcaagatcagctttgagctgatgcgggagccgtgcatcacgcccagtggcatcacctacgaccgcaaggacatcgaggagcacctgcagcgtgtgggtcattttgacccggtgaccaggagccccctgacccaggaacagctcatccccaacttggctatgaaggaggttattgacgcattcatctctgagaatggctgggtggaggactacggcagcggcagcccggcggcgaaacgcgtgaaactggattacccatacgatgttccagattacgcttaa

SEQ ID NO: 1690 - DNA, 765 bp, synthetic construct
  source 1..765: mol_type = other DNA; note = TCF4-(GS)5-CHIP-NLS-HA nucleic acid
atggatgacctaggcgccaacgacgaactgatttccttcaaagacgagggcgaacaggaggagaagagctccgaaaactcctcggcagagagggatttagctgatgtcaaatcgtctctagtcaatgaatcagaaacgggcagcggcagcggcagcggcagcggcagccggctgaacttcggggacgacatccccagcgctcttcgaatcgcgaagaagaagcgctggaacagcattgaggagcggcgcatccaccaggagagcgagctgcactcctacctctccaggctcattgccgcggagcgtgagagggagctggaagagtgccagcgaaaccacgagggtgatgaggacgacagccacgtccgggcccagcaggcctgcattgaggccaagcacgacaagtacatggcggacatggacgagcttttttctcaggtggatgagaagaggaagaagcgagacatccccgactacctgtgtggcaagatcagctttgagctgatgcgggagccgtgcatcacgcccagtggcatcacctacgaccgcaaggacatcgaggagcacctgcagcgtgtgggtcattttgacccggtgaccaggagccccctgacccaggaacagctcatccccaacttggctatgaaggaggttattgacgcattcatctctgagaatggctgggtggaggactacggcagcggcagcccggcggcgaaacgcgtgaaactggattacccatacgatgttccagattacgcttaa

SEQ ID NO: 1691 - DNA, 771 bp, synthetic construct
  source 1..771: mol_type = other DNA; note = TCF4-(GS)6-CHIP-NLS-HA nucleic acid
atggatgacctaggcgccaacgacgaactgatttccttcaaagacgagggcgaacaggaggagaagagctccgaaaactcctcggcagagagggatttagctgatgtcaaatcgtctctagtcaatgaatcagaaacgggcagcggcagcggcagcggcagcggcagcggcagccggctgaacttcggggacgacatccccagcgctcttcgaatcgcgaagaagaagcgctggaacagcattgaggagcggcgcatccaccaggagagcgagctgcactcctacctctccaggctcattgccgcggagcgtgagagggagctggaagagtgccagcgaaaccacgagggtgatgaggacgacagccacgtccgggcccagcaggcctgcattgaggccaagcacgacaagtacatggcggacatggacgagcttttttctcaggtggatgagaagaggaagaagcgagacatccccgactacctgtgtggcaagatcagctttgagctgatgcgggagccgtgcatcacgcccagtggcatcacctacgaccgcaaggacatcgaggagcacctgcagcgtgtgggtcattttgacccggtgaccaggagccccctgacccaggaacagctcatccccaacttggctatgaaggaggttattgacgcattcatctctgagaatggctgggtggaggactacggcagcggcagcccggcggcgaaacgcgtgaaactggattacccatacgatgttccagattacgcttaa

SEQ ID NO: 1692 - DNA, 294 bp, synthetic construct
  source 1..294: mol_type = other DNA; note = NLS-DCAF1-(GS)1-TCF4 nucleic acid
ccggcggcgaaacgcgtgaaactggatggcagcggcagcggcagccaggcgccgattaactttaccagccgcctgaaccgccgcgcgagctttccgaaatatggcggcgtggatggcggctgctttgatcgccatctgatttttagccgcggcagcgatgacctaggcgccaacgacgaactgatttccttcaaagacgagggcgaacaggaggagaagagctccgaaaactcctcggcagagagggatttagctgatgtcaaatcgtctctagtcaatgaatcagaaacgtaa

SEQ ID NO: 1693 - DNA, 300 bp, synthetic construct
  source 1..300: mol_type = other DNA; note = NLS-DCAF1-(GS)2-TCF4 nucleic acid
ccggcggcgaaacgcgtgaaactggatggcagcggcagcggcagccaggcgccgattaactttaccagccgcctgaaccgccgcgcgagctttccgaaatatggcggcgtggatggcggctgctttgatcgccatctgatttttagccgcggcagcggcagcgatgacctaggcgccaacgacgaactgatttccttcaaagacgagggcgaacaggaggagaagagctccgaaaactcctcggcagagagggatttagctgatgtcaaatcgtctctagtcaatgaatcagaaacgtaa

SEQ ID NO: 1694 - DNA, 306 bp, synthetic construct
  source 1..306: mol_type = other DNA; note = NLS-DCAF1-(GS)3-TCF4 nucleic acid
ccggcggcgaaacgcgtgaaactggatggcagcggcagcggcagccaggcgccgattaactttaccagccgcctgaaccgccgcgcgagctttccgaaatatggcggcgtggatggcggctgctttgatcgccatctgatttttagccgcggcagcggcagcggcagcgatgacctaggcgccaacgacgaactgatttccttcaaagacgagggcgaacaggaggagaagagctccgaaaactcctcggcagagagggatttagctgatgtcaaatcgtctctagtcaatgaatcagaaacgtaa

SEQ ID NO: 1695 - DNA, 312 bp, synthetic construct
  source 1..312: mol_type = other DNA; note = NLS-DCAF1-(GS)4-TCF4 nucleic acid
ccggcggcgaaacgcgtgaaactggatggcagcggcagcggcagccaggcgccgattaactttaccagccgcctgaaccgccgcgcgagctttccgaaatatggcggcgtggatggcggctgctttgatcgccatctgatttttagccgcggcagcggcagcggcagcggcagcgatgacctaggcgccaacgacgaactgatttccttcaaagacgagggcgaacaggaggagaagagctccgaaaactcctcggcagagagggatttagctgatgtcaaatcgtctctagtcaatgaatcagaaacgtaa

SEQ ID NO: 1696 - DNA, 318 bp, synthetic construct
  source 1..318: mol_type = other DNA; note = NLS-DCAF1-(GS)5-TCF4 nucleic acid
ccggcggcgaaacgcgtgaaactggatggcagcggcagcggcagccaggcgccgattaactttaccagccgcctgaaccgccgcgcgagctttccgaaatatggcggcgtggatggcggctgctttgatcgccatctgatttttagccgcggcagcggcagcggcagcggcagcggcagcgatgacctaggcgccaacgacgaactgatttccttcaaagacgagggcgaacaggaggagaagagctccgaaaactcctcggcagagagggatttagctgatgtcaaatcgtctctagtcaatgaatcagaaacgtaa

SEQ ID NO: 1697 - DNA, 324 bp, synthetic construct
  source 1..324: mol_type = other DNA; note = NLS-DCAF1-(GS)6-TCF4 nucleic acid
ccggcggcgaaacgcgtgaaactggatggcagcggcagcggcagccaggcgccgattaactttaccagccgcctgaaccgccgcgcgagctttccgaaatatggcggcgtggatggcggctgctttgatcgccatctgatttttagccgcggcagcggcagcggcagcggcagcggcagcggcagcgatgacctaggcgccaacgacgaactgatttccttcaaagacgagggcgaacaggaggagaagagctccgaaaactcctcggcagagagggatttagctgatgtcaaatcgtctctagtcaatgaatcagaaacgtaa

SEQ ID NO: 1698 - DNA, 324 bp, synthetic construct
  source 1..324: mol_type = other DNA; note = HA-NLS-DCAF1-(GS)1-TCF4 nucleic acid
atgtacccatacgatgttccagattacgctccggcggcgaaacgcgtgaaactggatggcagcggcagcggcagccaggcgccgattaactttaccagccgcctgaaccgccgcgcgagctttccgaaatatggcggcgtggatggcggctgctttgatcgccatctgatttttagccgcggcagcgatgacctaggcgccaacgacgaactgatttccttcaaagacgagggcgaacaggaggagaagagctccgaaaactcctcggcagagagggatttagctgatgtcaaatcgtctctagtcaatgaatcagaaacgtaa

SEQ ID NO: 1699 - DNA, 330 bp, synthetic construct
  source 1..330: mol_type = other DNA; note = HA-NLS-DCAF1-(GS)2-TCF4 nucleic acid
atgtacccatacgatgttccagattacgctccggcggcgaaacgcgtgaaactggatggcagcggcagcggcagccaggcgccgattaactttaccagccgcctgaaccgccgcgcgagctttccgaaatatggcggcgtggatggcggctgctttgatcgccatctgatttttagccgcggcagcggcagcgatgacctaggcgccaacgacgaactgatttccttcaaagacgagggcgaacaggaggagaagagctccgaaaactcctcggcagagagggatttagctgatgtcaaatcgtctctagtcaatgaatcagaaacgtaa

SEQ ID NO: 1700 - DNA, 336 bp, synthetic construct
  source 1..336: mol_type = other DNA; note = HA-NLS-DCAF1-(GS)3-TCF4 nucleic acid
atgtacccatacgatgttccagattacgctccggcggcgaaacgcgtgaaactggatggcagcggcagcggcagccaggcgccgattaactttaccagccgcctgaaccgccgcgcgagctttccgaaatatggcggcgtggatggcggctgctttgatcgccatctgatttttagccgcggcagcggcagcggcagcgatgacctaggcgccaacgacgaactgatttccttcaaagacgagggcgaacaggaggagaagagctccgaaaactcctcggcagagagggatttagctgatgtcaaatcgtctctagtcaatgaatcagaaacgtaa

SEQ ID NO: 1701 - DNA, 342 bp, synthetic construct
  source 1..342: mol_type = other DNA; note = HA-NLS-DCAF1-(GS)4-TCF4 nucleic acid
atgtacccatacgatgttccagattacgctccggcggcgaaacgcgtgaaactggatggcagcggcagcggcagccaggcgccgattaactttaccagccgcctgaaccgccgcgcgagctttccgaaatatggcggcgtggatggcggctgctttgatcgccatctgatttttagccgcggcagcggcagcggcagcggcagcgatgacctaggcgccaacgacgaactgatttccttcaaagacgagggcgaacaggaggagaagagctccgaaaactcctcggcagagagggatttagctgatgtcaaatcgtctctagtcaatgaatcagaaacgtaa

SEQ ID NO: 1702 - DNA, 348 bp, synthetic construct
  source 1..348: mol_type = other DNA; note = HA-NLS-DCAF1-(GS)5-TCF4 nucleic acid
atgtacccatacgatgttccagattacgctccggcggcgaaacgcgtgaaactggatggcagcggcagcggcagccaggcgccgattaactttaccagccgcctgaaccgccgcgcgagctttccgaaatatggcggcgtggatggcggctgctttgatcgccatctgatttttagccgcggcagcggcagcggcagcggcagcggcagcgatgacctaggcgccaacgacgaactgatttccttcaaagacgagggcgaacaggaggagaagagctccgaaaactcctcggcagagagggatttagctgatgtcaaatcgtctctagtcaatgaatcagaaacgtaa

SEQ ID NO: 1703 - DNA, 354 bp, synthetic construct
  source 1..354: mol_type = other DNA; note = HA-NLS-DCAF1-(GS)6-TCF4 nucleic acid
atgtacccatacgatgttccagattacgctccggcggcgaaacgcgtgaaactggatggcagcggcagcggcagccaggcgccgattaactttaccagccgcctgaaccgccgcgcgagctttccgaaatatggcggcgtggatggcggctgctttgatcgccatctgatttttagccgcggcagcggcagcggcagcggcagcggcagcggcagcgatgacctaggcgccaacgacgaactgatttccttcaaagacgagggcgaacaggaggagaagagctccgaaaactcctcggcagagagggatttagctgatgtcaaatcgtctctagtcaatgaatcagaaacgtaa

SEQ ID NO: 1704 - DNA, 1257 bp, synthetic construct
  source 1..1257: mol_type = other DNA; note = NLS-TCF4-(GS)1-E6AP nucleic acid
ccggcggcgaaacgcgtgaaactggatggcagcggcagcggcagcgatgacctaggcgccaacgacgaactgatttccttcaaagacgagggcgaacaggaggagaagagctccgaaaactcctcggcagagagggatttagctgatgtcaaatcgtctctagtcaatgaatcagaaacgggcagcaatccatatttgagactcaaagttagacgtgaccatatcatagatgatgcacttgtccggctagagatgatcgctatggaaaatcctgcagacttgaagaagcagttgtatgtggaatttgaaggagaacaaggagttgatgagggaggtgtttccaaagaattttttcagctggttgtggaggaaatcttcaatccagatattggtatgttcacatacgatgaatctacaaaattgttttggtttaatccatcttcttttgaaactgagggtcagtttactctgattggcatagtactgggtctggctatttacaataactgtatactggatgtacattttcccatggttgtctacaggaagctaatggggaaaaaaggaacttttcgtgacttgggagactctcacccagttctatatcagagtttaaaagatttattggagtatgaagggaatgtggaagatgacatgatgatcactttccagatatcacagacagatctttttggtaacccaatgatgtatgatctaaaggaaaatggtgataaaattccaattacaaatgaaaacaggaaggaatttgtcaatctttattctgactacattctcaataaatcagtagaaaaacagttcaaggcttttcggagaggttttcatatggtgaccaatgaatctcccttaaagtacttattcagaccagaagaaattgaattgcttatatgtggaagccggaatctagatttccaagcactagaagaaactacagaatatgacggtggctataccagggactctgttctgattagggagttctgggaaatcgttcattcatttacagatgaacagaaaagactcttcttgcagtttacaacgggcacagacagagcacctgtgggaggactaggaaaattaaagatgattatagccaaaaatggcccagacacagaaaggttacctacatctcatacttgctttaatgtgcttttacttccggaatactcaagcaaagaaaaacttaaagagagattgttgaaggccatcacgtatgccaaaggatttggcatgctgtaa

SEQ ID NO: 1705 - DNA, 1263 bp, synthetic construct
  source 1..1263: mol_type = other DNA; note = NLS-TCF4-(GS)2-E6AP nucleic acid
ccggcggcgaaacgcgtgaaactggatggcagcggcagcggcagcgatgacctaggcgccaacgacgaactgatttccttcaaagacgagggcgaacaggaggagaagagctccgaaaactcctcggcagagagggatttagctgatgtcaaatcgtctctagtcaatgaatcagaaacgggcagcggcagcaatccatatttgagactcaaagttagacgtgaccatatcatagatgatgcacttgtccggctagagatgatcgctatggaaaatcctgcagacttgaagaagcagttgtatgtggaatttgaaggagaacaaggagttgatgagggaggtgtttccaaagaattttttcagctggttgtggaggaaatcttcaatccagatattggtatgttcacatacgatgaatctacaaaattgttttggtttaatccatcttcttttgaaactgagggtcagtttactctgattggcatagtactgggtctggctatttacaataactgtatactggatgtacattttcccatggttgtctacaggaagctaatggggaaaaaaggaacttttcgtgacttgggagactctcacccagttctatatcagagtttaaaagatttattggagtatgaagggaatgtggaagatgacatgatgatcactttccagatatcacagacagatctttttggtaacccaatgatgtatgatctaaaggaaaatggtgataaaattccaattacaaatgaaaacaggaaggaatttgtcaatctttattctgactacattctcaataaatcagtagaaaaacagttcaaggcttttcggagaggttttcatatggtgaccaatgaatctcccttaaagtacttattcagaccagaagaaattgaattgcttatatgtggaagccggaatctagatttccaagcactagaagaaactacagaatatgacggtggctataccagggactctgttctgattagggagttctgggaaatcgttcattcatttacagatgaacagaaaagactcttcttgcagtttacaacgggcacagacagagcacctgtgggaggactaggaaaattaaagatgattatagccaaaaatggcccagacacagaaaggttacctacatctcatacttgctttaatgtgcttttacttccggaatactcaagcaaagaaaaacttaaagagagattgttgaaggccatcacgtatgccaaaggatttggcatgctgtaa

SEQ ID NO: 1706 - DNA, 1269 bp, synthetic construct
  source 1..1269: mol_type = other DNA; note = NLS-TCF4(GS)3-E6AP nucleic acid
ccggcggcgaaacgcgtgaaactggatggcagcggcagcggcagcgatgacctaggcgccaacgacgaactgatttccttcaaagacgagggcgaacaggaggagaagagctccgaaaactcctcggcagagagggatttagctgatgtcaaatcgtctctagtcaatgaatcagaaacgggcagcggcagcggcagcaatccatatttgagactcaaagttagacgtgaccatatcatagatgatgcacttgtccggctagagatgatcgctatggaaaatcctgcagacttgaagaagcagttgtatgtggaatttgaaggagaacaaggagttgatgagggaggtgtttccaaagaattttttcagctggttgtggaggaaatcttcaatccagatattggtatgttcacatacgatgaatctacaaaattgttttggtttaatccatcttcttttgaaactgagggtcagtttactctgattggcatagtactgggtctggctatttacaataactgtatactggatgtacattttcccatggttgtctacaggaagctaatggggaaaaaaggaacttttcgtgacttgggagactctcacccagttctatatcagagtttaaaagatttattggagtatgaagggaatgtggaagatgacatgatgatcactttccagatatcacagacagatctttttggtaacccaatgatgtatgatctaaaggaaaatggtgataaaattccaattacaaatgaaaacaggaaggaatttgtcaatctttattctgactacattctcaataaatcagtagaaaaacagttcaaggcttttcggagaggttttcatatggtgaccaatgaatctcccttaaagtacttattcagaccagaagaaattgaattgcttatatgtggaagccggaatctagatttccaagcactagaagaaactacagaatatgacggtggctataccagggactctgttctgattagggagttctgggaaatcgttcattcatttacagatgaacagaaaagactcttcttgcagtttacaacgggcacagacagagcacctgtgggaggactaggaaaattaaagatgattatagccaaaaatggcccagacacagaaaggttacctacatctcatacttgctttaatgtgcttttacttccggaatactcaagcaaagaaaaacttaaagagagattgttgaaggccatcacgtatgccaaaggatttggcatgctgtaa

SEQ ID NO: 1707 - DNA, 1275 bp, synthetic construct
  source 1..1275: mol_type = other DNA; note = NLS-TCF4-(GS)4-E6AP nucleic acid
ccggcggcgaaacgcgtgaaactggatggcagcggcagcggcagcgatgacctaggcgccaacgacgaactgatttccttcaaagacgagggcgaacaggaggagaagagctccgaaaactcctcggcagagagggatttagctgatgtcaaatcgtctctagtcaatgaatcagaaacgggcagcggcagcggcagcggcagcaatccatatttgagactcaaagttagacgtgaccatatcatagatgatgcacttgtccggctagagatgatcgctatggaaaatcctgcagacttgaagaagcagttgtatgtggaatttgaaggagaacaaggagttgatgagggaggtgtttccaaagaattttttcagctggttgtggaggaaatcttcaatccagatattggtatgttcacatacgatgaatctacaaaattgttttggtttaatccatcttcttttgaaactgagggtcagtttactctgattggcatagtactgggtctggctatttacaataactgtatactggatgtacattttcccatggttgtctacaggaagctaatggggaaaaaaggaacttttcgtgacttgggagactctcacccagttctatatcagagtttaaaagatttattggagtatgaagggaatgtggaagatgacatgatgatcactttccagatatcacagacagatctttttggtaacccaatgatgtatgatctaaaggaaaatggtgataaaattccaattacaaatgaaaacaggaaggaatttgtcaatctttattctgactacattctcaataaatcagtagaaaaacagttcaaggcttttcggagaggttttcatatggtgaccaatgaatctcccttaaagtacttattcagaccagaagaaattgaattgcttatatgtggaagccggaatctagatttccaagcactagaagaaactacagaatatgacggtggctataccagggactctgttctgattagggagttctgggaaatcgttcattcatttacagatgaacagaaaagactcttcttgcagtttacaacgggcacagacagagcacctgtgggaggactaggaaaattaaagatgattatagccaaaaatggcccagacacagaaaggttacctacatctcatacttgctttaatgtgcttttacttccggaatactcaagcaaagaaaaacttaaagagagattgttgaaggccatcacgtatgccaaaggatttggcatgctgtaa

SEQ ID NO: 1708 - DNA, 1281 bp, synthetic construct
  source 1..1281: mol_type = other DNA; note = NLS-TCF4-(GS)5-E6AP nucleic acid
ccggcggcgaaacgcgtgaaactggatggcagcggcagcggcagcgatgacctaggcgccaacgacgaactgatttccttcaaagacgagggcgaacaggaggagaagagctccgaaaactcctcggcagagagggatttagctgatgtcaaatcgtctctagtcaatgaatcagaaacgggcagcggcagcggcagcggcagcggcagcaatccatatttgagactcaaagttagacgtgaccatatcatagatgatgcacttgtccggctagagatgatcgctatggaaaatcctgcagacttgaagaagcagttgtatgtggaatttgaaggagaacaaggagttgatgagggaggtgtttccaaagaattttttcagctggttgtggaggaaatcttcaatccagatattggtatgttcacatacgatgaatctacaaaattgttttggtttaatccatcttcttttgaaactgagggtcagtttactctgattggcatagtactgggtctggctatttacaataactgtatactggatgtacattttcccatggttgtctacaggaagctaatggggaaaaaaggaacttttcgtgacttgggagactctcacccagttctatatcagagtttaaaagatttattggagtatgaagggaatgtggaagatgacatgatgatcactttccagatatcacagacagatctttttggtaacccaatgatgtatgatctaaaggaaaatggtgataaaattccaattacaaatgaaaacaggaaggaatttgtcaatctttattctgactacattctcaataaatcagtagaaaaacagttcaaggcttttcggagaggttttcatatggtgaccaatgaatctcccttaaagtacttattcagaccagaagaaattgaattgcttatatgtggaagccggaatctagatttccaagcactagaagaaactacagaatatgacggtggctataccagggactctgttctgattagggagttctgggaaatcgttcattcatttacagatgaacagaaaagactcttcttgcagtttacaacgggcacagacagagcacctgtgggaggactaggaaaattaaagatgattatagccaaaaatggcccagacacagaaaggttacctacatctcatacttgctttaatgtgcttttacttccggaatactcaagcaaagaaaaacttaaagagagattgttgaaggccatcacgtatgccaaaggatttggcatgctgtaa

SEQ ID NO: 1709 - DNA, 1287 bp, synthetic construct
  source 1..1287: mol_type = other DNA; note = NLS-TCF4-(GS)6-E6AP nucleic acid
ccggcggcgaaacgcgtgaaactggatggcagcggcagcggcagcgatgacctaggcgccaacgacgaactgatttccttcaaagacgagggcgaacaggaggagaagagctccgaaaactcctcggcagagagggatttagctgatgtcaaatcgtctctagtcaatgaatcagaaacgggcagcggcagcggcagcggcagcggcagcggcagcaatccatatttgagactcaaagttagacgtgaccatatcatagatgatgcacttgtccggctagagatgatcgctatggaaaatcctgcagacttgaagaagcagttgtatgtggaatttgaaggagaacaaggagttgatgagggaggtgtttccaaagaattttttcagctggttgtggaggaaatcttcaatccagatattggtatgttcacatacgatgaatctacaaaattgttttggtttaatccatcttcttttgaaactgagggtcagtttactctgattggcatagtactgggtctggctatttacaataactgtatactggatgtacattttcccatggttgtctacaggaagctaatggggaaaaaaggaacttttcgtgacttgggagactctcacccagttctatatcagagtttaaaagatttattggagtatgaagggaatgtggaagatgacatgatgatcactttccagatatcacagacagatctttttggtaacccaatgatgtatgatctaaaggaaaatggtgataaaattccaattacaaatgaaaacaggaaggaatttgtcaatctttattctgactacattctcaataaatcagtagaaaaacagttcaaggcttttcggagaggttttcatatggtgaccaatgaatctcccttaaagtacttattcagaccagaagaaattgaattgcttatatgtggaagccggaatctagatttccaagcactagaagaaactacagaatatgacggtggctataccagggactctgttctgattagggagttctgggaaatcgttcattcatttacagatgaacagaaaagactcttcttgcagtttacaacgggcacagacagagcacctgtgggaggactaggaaaattaaagatgattatagccaaaaatggcccagacacagaaaggttacctacatctcatacttgctttaatgtgcttttacttccggaatactcaagcaaagaaaaacttaaagagagattgttgaaggccatcacgtatgccaaaggatttggcatgctgtaa

SEQ ID NO: 1710 - DNA, 1287 bp, synthetic construct
  source 1..1287: mol_type = other DNA; note = HA-NLS-TCF4-(GS)1-E6AP nucleic acid
atgtacccatacgatgttccagattacgctccggcggcgaaacgcgtgaaactggatggcagcggcagcggcagcgatgacctaggcgccaacgacgaactgatttccttcaaagacgagggcgaacaggaggagaagagctccgaaaactcctcggcagagagggatttagctgatgtcaaatcgtctctagtcaatgaatcagaaacgggcagcaatccatatttgagactcaaagttagacgtgaccatatcatagatgatgcacttgtccggctagagatgatcgctatggaaaatcctgcagacttgaagaagcagttgtatgtggaatttgaaggagaacaaggagttgatgagggaggtgtttccaaagaattttttcagctggttgtggaggaaatcttcaatccagatattggtatgttcacatacgatgaatctacaaaattgttttggtttaatccatcttcttttgaaactgagggtcagtttactctgattggcatagtactgggtctggctatttacaataactgtatactggatgtacattttcccatggttgtctacaggaagctaatggggaaaaaaggaacttttcgtgacttgggagactctcacccagttctatatcagagtttaaaagatttattggagtatgaagggaatgtggaagatgacatgatgatcactttccagatatcacagacagatctttttggtaacccaatgatgtatgatctaaaggaaaatggtgataaaattccaattacaaatgaaaacaggaaggaatttgtcaatctttattctgactacattctcaataaatcagtagaaaaacagttcaaggcttttcggagaggttttcatatggtgaccaatgaatctcccttaaagtacttattcagaccagaagaaattgaattgcttatatgtggaagccggaatctagatttccaagcactagaagaaactacagaatatgacggtggctataccagggactctgttctgattagggagttctgggaaatcgttcattcatttacagatgaacagaaaagactcttcttgcagtttacaacgggcacagacagagcacctgtgggaggactaggaaaattaaagatgattatagccaaaaatggcccagacacagaaaggttacctacatctcatacttgctttaatgtgcttttacttccggaatactcaagcaaagaaaaacttaaagagagattgttgaaggccatcacgtatgccaaaggatttggcatgctgtaa

SEQ ID NO: 1711 - DNA, 1293 bp, synthetic construct
  source 1..1293: mol_type = other DNA; note = HA-NLS-TCF4-(GS)2-E6AP nucleic acid
atgtacccatacgatgttccagattacgctccggcggcgaaacgcgtgaaactggatggcagcggcagcggcagcgatgacctaggcgccaacgacgaactgatttccttcaaagacgagggcgaacaggaggagaagagctccgaaaactcctcggcagagagggatttagctgatgtcaaatcgtctctagtcaatgaatcagaaacgggcagcggcagcaatccatatttgagactcaaagttagacgtgaccatatcatagatgatgcacttgtccggctagagatgatcgctatggaaaatcctgcagacttgaagaagcagttgtatgtggaatttgaaggagaacaaggagttgatgagggaggtgtttccaaagaattttttcagctggttgtggaggaaatcttcaatccagatattggtatgttcacatacgatgaatctacaaaattgttttggtttaatccatcttcttttgaaactgagggtcagtttactctgattggcatagtactgggtctggctatttacaataactgtatactggatgtacattttcccatggttgtctacaggaagctaatggggaaaaaaggaacttttcgtgacttgggagactctcacccagttctatatcagagtttaaaagatttattggagtatgaagggaatgtggaagatgacatgatgatcactttccagatatcacagacagatctttttggtaacccaatgatgtatgatctaaaggaaaatggtgataaaattccaattacaaatgaaaacaggaaggaatttgtcaatctttattctgactacattctcaataaatcagtagaaaaacagttcaaggcttttcggagaggttttcatatggtgaccaatgaatctcccttaaagtacttattcagaccagaagaaattgaattgcttatatgtggaagccggaatctagatttccaagcactagaagaaactacagaatatgacggtggctataccagggactctgttctgattagggagttctgggaaatcgttcattcatttacagatgaacagaaaagactcttcttgcagtttacaacgggcacagacagagcacctgtgggaggactaggaaaattaaagatgattatagccaaaaatggcccagacacagaaaggttacctacatctcatacttgctttaatgtgcttttacttccggaatactcaagcaaagaaaaacttaaagagagattgttgaaggccatcacgtatgccaaaggatttggcatgctgtaa

SEQ ID NO: 1712 - DNA, 1299 bp, synthetic construct
  source 1..1299: mol_type = other DNA; note = HA-NLS-TCF4(GS)3-E6AP nucleic acid
atgtacccatacgatgttccagattacgctccggcggcgaaacgcgtgaaactggatggcagcggcagcggcagcgatgacctaggcgccaacgacgaactgatttccttcaaagacgagggcgaacaggaggagaagagctccgaaaactcctcggcagagagggatttagctgatgtcaaatcgtctctagtcaatgaatcagaaacgggcagcggcagcggcagcaatccatatttgagactcaaagttagacgtgaccatatcatagatgatgcacttgtccggctagagatgatcgctatggaaaatcctgcagacttgaagaagcagttgtatgtggaatttgaaggagaacaaggagttgatgagggaggtgtttccaaagaattttttcagctggttgtggaggaaatcttcaatccagatattggtatgttcacatacgatgaatctacaaaattgttttggtttaatccatcttcttttgaaactgagggtcagtttactctgattggcatagtactgggtctggctatttacaataactgtatactggatgtacattttcccatggttgtctacaggaagctaatggggaaaaaaggaacttttcgtgacttgggagactctcacccagttctatatcagagtttaaaagatttattggagtatgaagggaatgtggaagatgacatgatgatcactttccagatatcacagacagatctttttggtaacccaatgatgtatgatctaaaggaaaatggtgataaaattccaattacaaatgaaaacaggaaggaatttgtcaatctttattctgactacattctcaataaatcagtagaaaaacagttcaaggcttttcggagaggttttcatatggtgaccaatgaatctcccttaaagtacttattcagaccagaagaaattgaattgcttatatgtggaagccggaatctagatttccaagcactagaagaaactacagaatatgacggtggctataccagggactctgttctgattagggagttctgggaaatcgttcattcatttacagatgaacagaaaagactcttcttgcagtttacaacgggcacagacagagcacctgtgggaggactaggaaaattaaagatgattatagccaaaaatggcccagacacagaaaggttacctacatctcatacttgctttaatgtgcttttacttccggaatactcaagcaaagaaaaacttaaagagagattgttgaaggccatcacgtatgccaaaggatttggcatgctgtaa

SEQ ID NO: 1713 - DNA, 1305 bp, synthetic construct
  source 1..1305: mol_type = other DNA; note = HA-NLS-TCF4-(GS)4-E6AP nucleic acid
atgtacccatacgatgttccagattacgctccggcggcgaaacgcgtgaaactggatggcagcggcagcggcagcgatgacctaggcgccaacgacgaactgatttccttcaaagacgagggcgaacaggaggagaagagctccgaaaactcctcggcagagagggatttagctgatgtcaaatcgtctctagtcaatgaatcagaaacgggcagcggcagcggcagcggcagcaatccatatttgagactcaaagttagacgtgaccatatcatagatgatgcacttgtccggctagagatgatcgctatggaaaatcctgcagacttgaagaagcagttgtatgtggaatttgaaggagaacaaggagttgatgagggaggtgtttccaaagaattttttcagctggttgtggaggaaatcttcaatccagatattggtatgttcacatacgatgaatctacaaaattgttttggtttaatccatcttcttttgaaactgagggtcagtttactctgattggcatagtactgggtctggctatttacaataactgtatactggatgtacattttcccatggttgtctacaggaagctaatggggaaaaaaggaacttttcgtgacttgggagactctcacccagttctatatcagagtttaaaagatttattggagtatgaagggaatgtggaagatgacatgatgatcactttccagatatcacagacagatctttttggtaacccaatgatgtatgatctaaaggaaaatggtgataaaattccaattacaaatgaaaacaggaaggaatttgtcaatctttattctgactacattctcaataaatcagtagaaaaacagttcaaggcttttcggagaggttttcatatggtgaccaatgaatctcccttaaagtacttattcagaccagaagaaattgaattgcttatatgtggaagccggaatctagatttccaagcactagaagaaactacagaatatgacggtggctataccagggactctgttctgattagggagttctgggaaatcgttcattcatttacagatgaacagaaaagactcttcttgcagtttacaacgggcacagacagagcacctgtgggaggactaggaaaattaaagatgattatagccaaaaatggcccagacacagaaaggttacctacatctcatacttgctttaatgtgcttttacttccggaatactcaagcaaagaaaaacttaaagagagattgttgaaggccatcacgtatgccaaaggatttggcatgctgtaa

SEQ ID NO: 1714 - DNA, 1311 bp, synthetic construct
  source 1..1311: mol_type = other DNA; note = HA-NLS-TCF4-(GS)5-E6AP nucleic acid
atgtacccatacgatgttccagattacgctccggcggcgaaacgcgtgaaactggatggcagcggcagcggcagcgatgacctaggcgccaacgacgaactgatttccttcaaagacgagggcgaacaggaggagaagagctccgaaaactcctcggcagagagggatttagctgatgtcaaatcgtctctagtcaatgaatcagaaacgggcagcggcagcggcagcggcagcggcagcaatccatatttgagactcaaagttagacgtgaccatatcatagatgatgcacttgtccggctagagatgatcgctatggaaaatcctgcagacttgaagaagcagttgtatgtggaatttgaaggagaacaaggagttgatgagggaggtgtttccaaagaattttttcagctggttgtggaggaaatcttcaatccagatattggtatgttcacatacgatgaatctacaaaattgttttggtttaatccatcttcttttgaaactgagggtcagtttactctgattggcatagtactgggtctggctatttacaataactgtatactggatgtacattttcccatggttgtctacaggaagctaatggggaaaaaaggaacttttcgtgacttgggagactctcacccagttctatatcagagtttaaaagatttattggagtatgaagggaatgtggaagatgacatgatgatcactttccagatatcacagacagatctttttggtaacccaatgatgtatgatctaaaggaaaatggtgataaaattccaattacaaatgaaaacaggaaggaatttgtcaatctttattctgactacattctcaataaatcagtagaaaaacagttcaaggcttttcggagaggttttcatatggtgaccaatgaatctcccttaaagtacttattcagaccagaagaaattgaattgcttatatgtggaagccggaatctagatttccaagcactagaagaaactacagaatatgacggtggctataccagggactctgttctgattagggagttctgggaaatcgttcattcatttacagatgaacagaaaagactcttcttgcagtttacaacgggcacagacagagcacctgtgggaggactaggaaaattaaagatgattatagccaaaaatggcccagacacagaaaggttacctacatctcatacttgctttaatgtgcttttacttccggaatactcaagcaaagaaaaacttaaagagagattgttgaaggccatcacgtatgccaaaggatttggcatgctgtaa

SEQ ID NO: 1715 - DNA, 1317 bp, synthetic construct
  source 1..1317: mol_type = other DNA; note = HA-NLS-TCF4-(GS)6-E6AP nucleic acid
atgtacccatacgatgttccagattacgctccggcggcgaaacgcgtgaaactggatggcagcggcagcggcagcgatgacctaggcgccaacgacgaactgatttccttcaaagacgagggcgaacaggaggagaagagctccgaaaactcctcggcagagagggatttagctgatgtcaaatcgtctctagtcaatgaatcagaaacgggcagcggcagcggcagcggcagcggcagcggcagcaatccatatttgagactcaaagttagacgtgaccatatcatagatgatgcacttgtccggctagagatgatcgctatggaaaatcctgcagacttgaagaagcagttgtatgtggaatttgaaggagaacaaggagttgatgagggaggtgtttccaaagaattttttcagctggttgtggaggaaatcttcaatccagatattggtatgttcacatacgatgaatctacaaaattgttttggtttaatccatcttcttttgaaactgagggtcagtttactctgattggcatagtactgggtctggctatttacaataactgtatactggatgtacattttcccatggttgtctacaggaagctaatggggaaaaaaggaacttttcgtgacttgggagactctcacccagttctatatcagagtttaaaagatttattggagtatgaagggaatgtggaagatgacatgatgatcactttccagatatcacagacagatctttttggtaacccaatgatgtatgatctaaaggaaaatggtgataaaattccaattacaaatgaaaacaggaaggaatttgtcaatctttattctgactacattctcaataaatcagtagaaaaacagttcaaggcttttcggagaggttttcatatggtgaccaatgaatctcccttaaagtacttattcagaccagaagaaattgaattgcttatatgtggaagccggaatctagatttccaagcactagaagaaactacagaatatgacggtggctataccagggactctgttctgattagggagttctgggaaatcgttcattcatttacagatgaacagaaaagactcttcttgcagtttacaacgggcacagacagagcacctgtgggaggactaggaaaattaaagatgattatagccaaaaatggcccagacacagaaaggttacctacatctcatacttgctttaatgtgcttttacttccggaatactcaagcaaagaaaaacttaaagagagattgttgaaggccatcacgtatgccaaaggatttggcatgctgtaa

SEQ ID NO: 1716 - DNA, 1245 bp, synthetic construct
  source 1..1245: mol_type = other DNA; note = FBXW7a-(GS)1-TCF4 nucleic acid
aatcaggaactgctctctgtgggcagcaaaagacgacgaactggaggctctctgagaggtaacccttcctcaagccaggtagatgaagaacagatgaatcgtgtggtagaggaggaacagcaacagcaactcagacaacaagaggaggagcacactgcaaggaatggtgaagttgttggagtagaacctagacctggaggccaaaatgattcccagcaaggacagttggaagaaaacaataatagatttatttcggtagatgaggactcctcaggaaaccaagaagaacaagaggaagatgaagaacatgctggtgaacaagatgaggaggatgaggaggaggaggagatggaccaggagagtgacgattttgatcagtctgatgatagtagcagagaagatgaacatacacatactaacagtgtcacgaactccagtagtattgtggacctgcccgttcaccaactctcctccccattctatacaaaaacaacaaaaatgaaaagaaagttggaccatggttctgaggtccgctctttttctttgggaaagaaaccatgcaaagtctcagaatatacaagtaccactgggcttgtaccatgttcagcaacaccaacaacttttggggacctcagagcagccaatggccaagggcaacaacgacgccgaattacatctgtccagccacctacaggcctccaggaatggctaaaaatgtttcagagctggagtggaccagagaaattgcttgctttagatgaactcattgatagttgtgaaccaacacaagtaaaacatatgatgcaagtgatagaaccccagtttcaacgagacttcatttcattgctccctaaagagttggcactctatgtgctttcattcctggaacccaaagacctgctacaagcagctcagacatgtcgctactggagaattttggctgaagacaaccttctctggagagagaaatgcaaagaagaggggattgatgaaccattgcacatcaagagaagaaaagtaataaaaccaggtttcatacacagtccatggaaaagtgcatacatcagacagcacagaattgatactaactcgaggcgaggaggcagcgatgacctaggcgccaacgacgaactgatttccttcaaagacgagggcgaacaggaggagaagagctccgaaaactcctcggcagagagggatttagctgatgtcaaatcgtctctagtcaatgaatcagaaacgtaa

SEQ ID NO: 1717 - DNA, 1251 bp, synthetic construct
  source 1..1251: mol_type = other DNA; note = FBXW7a-(GS)2-TCF4 nucleic acid
aatcaggaactgctctctgtgggcagcaaaagacgacgaactggaggctctctgagaggtaacccttcctcaagccaggtagatgaagaacagatgaatcgtgtggtagaggaggaacagcaacagcaactcagacaacaagaggaggagcacactgcaaggaatggtgaagttgttggagtagaacctagacctggaggccaaaatgattcccagcaaggacagttggaagaaaacaataatagatttatttcggtagatgaggactcctcaggaaaccaagaagaacaagaggaagatgaagaacatgctggtgaacaagatgaggaggatgaggaggaggaggagatggaccaggagagtgacgattttgatcagtctgatgatagtagcagagaagatgaacatacacatactaacagtgtcacgaactccagtagtattgtggacctgcccgttcaccaactctcctccccattctatacaaaaacaacaaaaatgaaaagaaagttggaccatggttctgaggtccgctctttttctttgggaaagaaaccatgcaaagtctcagaatatacaagtaccactgggcttgtaccatgttcagcaacaccaacaacttttggggacctcagagcagccaatggccaagggcaacaacgacgccgaattacatctgtccagccacctacaggcctccaggaatggctaaaaatgtttcagagctggagtggaccagagaaattgcttgctttagatgaactcattgatagttgtgaaccaacacaagtaaaacatatgatgcaagtgatagaaccccagtttcaacgagacttcatttcattgctccctaaagagttggcactctatgtgctttcattcctggaacccaaagacctgctacaagcagctcagacatgtcgctactggagaattttggctgaagacaaccttctctggagagagaaatgcaaagaagaggggattgatgaaccattgcacatcaagagaagaaaagtaataaaaccaggtttcatacacagtccatggaaaagtgcatacatcagacagcacagaattgatactaactcgaggcgaggaggcagcggcagcgatgacctaggcgccaacgacgaactgatttccttcaaagacgagggcgaacaggaggagaagagctccgaaaactcctcggcagagagggatttagctgatgtcaaatcgtctctagtcaatgaatcagaaacgtaa

SEQ ID NO: 1718 - DNA, 1257 bp, synthetic construct
  source 1..1257: mol_type = other DNA; note = FBXW7a-(GS)3-TCF4 nucleic acid
aatcaggaactgctctctgtgggcagcaaaagacgacgaactggaggctctctgagaggtaacccttcctcaagccaggtagatgaagaacagatgaatcgtgtggtagaggaggaacagcaacagcaactcagacaacaagaggaggagcacactgcaaggaatggtgaagttgttggagtagaacctagacctggaggccaaaatgattcccagcaaggacagttggaagaaaacaataatagatttatttcggtagatgaggactcctcaggaaaccaagaagaacaagaggaagatgaagaacatgctggtgaacaagatgaggaggatgaggaggaggaggagatggaccaggagagtgacgattttgatcagtctgatgatagtagcagagaagatgaacatacacatactaacagtgtcacgaactccagtagtattgtggacctgcccgttcaccaactctcctccccattctatacaaaaacaacaaaaatgaaaagaaagttggaccatggttctgaggtccgctctttttctttgggaaagaaaccatgcaaagtctcagaatatacaagtaccactgggcttgtaccatgttcagcaacaccaacaacttttggggacctcagagcagccaatggccaagggcaacaacgacgccgaattacatctgtccagccacctacaggcctccaggaatggctaaaaatgtttcagagctggagtggaccagagaaattgcttgctttagatgaactcattgatagttgtgaaccaacacaagtaaaacatatgatgcaagtgatagaaccccagtttcaacgagacttcatttcattgctccctaaagagttggcactctatgtgctttcattcctggaacccaaagacctgctacaagcagctcagacatgtcgctactggagaattttggctgaagacaaccttctctggagagagaaatgcaaagaagaggggattgatgaaccattgcacatcaagagaagaaaagtaataaaaccaggtttcatacacagtccatggaaaagtgcatacatcagacagcacagaattgatactaactcgaggcgaggaggcagcggcagcggcagcgatgacctaggcgccaacgacgaactgatttccttcaaagacgagggcgaacaggaggagaagagctccgaaaactcctcggcagagagggatttagctgatgtcaaatcgtctctagtcaatgaatcagaaacgtaa

SEQ ID NO: 1719 - DNA, 1263 bp, synthetic construct
  source 1..1263: mol_type = other DNA; note = FBXW7a-(GS)4-TCF4 nucleic acid
aatcaggaactgctctctgtgggcagcaaaagacgacgaactggaggctctctgagaggtaacccttcctcaagccaggtagatgaagaacagatgaatcgtgtggtagaggaggaacagcaacagcaactcagacaacaagaggaggagcacactgcaaggaatggtgaagttgttggagtagaacctagacctggaggccaaaatgattcccagcaaggacagttggaagaaaacaataatagatttatttcggtagatgaggactcctcaggaaaccaagaagaacaagaggaagatgaagaacatgctggtgaacaagatgaggaggatgaggaggaggaggagatggaccaggagagtgacgattttgatcagtctgatgatagtagcagagaagatgaacatacacatactaacagtgtcacgaactccagtagtattgtggacctgcccgttcaccaactctcctccccattctatacaaaaacaacaaaaatgaaaagaaagttggaccatggttctgaggtccgctctttttctttgggaaagaaaccatgcaaagtctcagaatatacaagtaccactgggcttgtaccatgttcagcaacaccaacaacttttggggacctcagagcagccaatggccaagggcaacaacgacgccgaattacatctgtccagccacctacaggcctccaggaatggctaaaaatgtttcagagctggagtggaccagagaaattgcttgctttagatgaactcattgatagttgtgaaccaacacaagtaaaacatatgatgcaagtgatagaaccccagtttcaacgagacttcatttcattgctccctaaagagttggcactctatgtgctttcattcctggaacccaaagacctgctacaagcagctcagacatgtcgctactggagaattttggctgaagacaaccttctctggagagagaaatgcaaagaagaggggattgatgaaccattgcacatcaagagaagaaaagtaataaaaccaggtttcatacacagtccatggaaaagtgcatacatcagacagcacagaattgatactaactcgaggcgaggaggcagcggcagcggcagcggcagcgatgacctaggcgccaacgacgaactgatttccttcaaagacgagggcgaacaggaggagaagagctccgaaaactcctcggcagagagggatttagctgatgtcaaatcgtctctagtcaatgaatcagaaacgtaa

SEQ ID NO: 1720 - DNA, 1269 bp, synthetic construct
  source 1..1269: mol_type = other DNA; note = FBXW7a-(GS)5-TCF4 nucleic acid
aatcaggaactgctctctgtgggcagcaaaagacgacgaactggaggctctctgagaggtaacccttcctcaagccaggtagatgaagaacagatgaatcgtgtggtagaggaggaacagcaacagcaactcagacaacaagaggaggagcacactgcaaggaatggtgaagttgttggagtagaacctagacctggaggccaaaatgattcccagcaaggacagttggaagaaaacaataatagatttatttcggtagatgaggactcctcaggaaaccaagaagaacaagaggaagatgaagaacatgctggtgaacaagatgaggaggatgaggaggaggaggagatggaccaggagagtgacgattttgatcagtctgatgatagtagcagagaagatgaacatacacatactaacagtgtcacgaactccagtagtattgtggacctgcccgttcaccaactctcctccccattctatacaaaaacaacaaaaatgaaaagaaagttggaccatggttctgaggtccgctctttttctttgggaaagaaaccatgcaaagtctcagaatatacaagtaccactgggcttgtaccatgttcagcaacaccaacaacttttggggacctcagagcagccaatggccaagggcaacaacgacgccgaattacatctgtccagccacctacaggcctccaggaatggctaaaaatgtttcagagctggagtggaccagagaaattgcttgctttagatgaactcattgatagttgtgaaccaacacaagtaaaacatatgatgcaagtgatagaaccccagtttcaacgagacttcatttcattgctccctaaagagttggcactctatgtgctttcattcctggaacccaaagacctgctacaagcagctcagacatgtcgctactggagaattttggctgaagacaaccttctctggagagagaaatgcaaagaagaggggattgatgaaccattgcacatcaagagaagaaaagtaataaaaccaggtttcatacacagtccatggaaaagtgcatacatcagacagcacagaattgatactaactcgaggcgaggaggcagcggcagcggcagcggcagcggcagcgatgacctaggcgccaacgacgaactgatttccttcaaagacgagggcgaacaggaggagaagagctccgaaaactcctcggcagagagggatttagctgatgtcaaatcgtctctagtcaatgaatcagaaacgtaa

SEQ ID NO: 1721 - DNA, 1275 bp, synthetic construct
  source 1..1275: mol_type = other DNA; note = FBXW7a-(GS)6-TCF4 nucleic acid
aatcaggaactgctctctgtgggcagcaaaagacgacgaactggaggctctctgagaggtaacccttcctcaagccaggtagatgaagaacagatgaatcgtgtggtagaggaggaacagcaacagcaactcagacaacaagaggaggagcacactgcaaggaatggtgaagttgttggagtagaacctagacctggaggccaaaatgattcccagcaaggacagttggaagaaaacaataatagatttatttcggtagatgaggactcctcaggaaaccaagaagaacaagaggaagatgaagaacatgctggtgaacaagatgaggaggatgaggaggaggaggagatggaccaggagagtgacgattttgatcagtctgatgatagtagcagagaagatgaacatacacatactaacagtgtcacgaactccagtagtattgtggacctgcccgttcaccaactctcctccccattctatacaaaaacaacaaaaatgaaaagaaagttggaccatggttctgaggtccgctctttttctttgggaaagaaaccatgcaaagtctcagaatatacaagtaccactgggcttgtaccatgttcagcaacaccaacaacttttggggacctcagagcagccaatggccaagggcaacaacgacgccgaattacatctgtccagccacctacaggcctccaggaatggctaaaaatgtttcagagctggagtggaccagagaaattgcttgctttagatgaactcattgatagttgtgaaccaacacaagtaaaacatatgatgcaagtgatagaaccccagtttcaacgagacttcatttcattgctccctaaagagttggcactctatgtgctttcattcctggaacccaaagacctgctacaagcagctcagacatgtcgctactggagaattttggctgaagacaaccttctctggagagagaaatgcaaagaagaggggattgatgaaccattgcacatcaagagaagaaaagtaataaaaccaggtttcatacacagtccatggaaaagtgcatacatcagacagcacagaattgatactaactcgaggcgaggaggcagcggcagcggcagcggcagcggcagcggcagcgatgacctaggcgccaacgacgaactgatttccttcaaagacgagggcgaacaggaggagaagagctccgaaaactcctcggcagagagggatttagctgatgtcaaatcgtctctagtcaatgaatcagaaacgtaa

SEQ ID NO: 1722 - DNA, 1275 bp, synthetic construct
  source 1..1275: mol_type = other DNA; note = HA-FBXW7a-(GS)1-TCF4 nucleic acid
atgtacccatacgatgttccagattacgctaatcaggaactgctctctgtgggcagcaaaagacgacgaactggaggctctctgagaggtaacccttcctcaagccaggtagatgaagaacagatgaatcgtgtggtagaggaggaacagcaacagcaactcagacaacaagaggaggagcacactgcaaggaatggtgaagttgttggagtagaacctagacctggaggccaaaatgattcccagcaaggacagttggaagaaaacaataatagatttatttcggtagatgaggactcctcaggaaaccaagaagaacaagaggaagatgaagaacatgctggtgaacaagatgaggaggatgaggaggaggaggagatggaccaggagagtgacgattttgatcagtctgatgatagtagcagagaagatgaacatacacatactaacagtgtcacgaactccagtagtattgtggacctgcccgttcaccaactctcctccccattctatacaaaaacaacaaaaatgaaaagaaagttggaccatggttctgaggtccgctctttttctttgggaaagaaaccatgcaaagtctcagaatatacaagtaccactgggcttgtaccatgttcagcaacaccaacaacttttggggacctcagagcagccaatggccaagggcaacaacgacgccgaattacatctgtccagccacctacaggcctccaggaatggctaaaaatgtttcagagctggagtggaccagagaaattgcttgctttagatgaactcattgatagttgtgaaccaacacaagtaaaacatatgatgcaagtgatagaaccccagtttcaacgagacttcatttcattgctccctaaagagttggcactctatgtgctttcattcctggaacccaaagacctgctacaagcagctcagacatgtcgctactggagaattttggctgaagacaaccttctctggagagagaaatgcaaagaagaggggattgatgaaccattgcacatcaagagaagaaaagtaataaaaccaggtttcatacacagtccatggaaaagtgcatacatcagacagcacagaattgatactaactcgaggcgaggaggcagcgatgacctaggcgccaacgacgaactgatttccttcaaagacgagggcgaacaggaggagaagagctccgaaaactcctcggcagagagggatttagctgatgtcaaatcgtctctagtcaatgaatcagaaacgtaa

SEQ ID NO: 1723 - DNA, 1281 bp, synthetic construct
  source 1..1281: mol_type = other DNA; note = HA-FBXW7a-(GS)2-TCF4 nucleic acid
atgtacccatacgatgttccagattacgctaatcaggaactgctctctgtgggcagcaaaagacgacgaactggaggctctctgagaggtaacccttcctcaagccaggtagatgaagaacagatgaatcgtgtggtagaggaggaacagcaacagcaactcagacaacaagaggaggagcacactgcaaggaatggtgaagttgttggagtagaacctagacctggaggccaaaatgattcccagcaaggacagttggaagaaaacaataatagatttatttcggtagatgaggactcctcaggaaaccaagaagaacaagaggaagatgaagaacatgctggtgaacaagatgaggaggatgaggaggaggaggagatggaccaggagagtgacgattttgatcagtctgatgatagtagcagagaagatgaacatacacatactaacagtgtcacgaactccagtagtattgtggacctgcccgttcaccaactctcctccccattctatacaaaaacaacaaaaatgaaaagaaagttggaccatggttctgaggtccgctctttttctttgggaaagaaaccatgcaaagtctcagaatatacaagtaccactgggcttgtaccatgttcagcaacaccaacaacttttggggacctcagagcagccaatggccaagggcaacaacgacgccgaattacatctgtccagccacctacaggcctccaggaatggctaaaaatgtttcagagctggagtggaccagagaaattgcttgctttagatgaactcattgatagttgtgaaccaacacaagtaaaacatatgatgcaagtgatagaaccccagtttcaacgagacttcatttcattgctccctaaagagttggcactctatgtgctttcattcctggaacccaaagacctgctacaagcagctcagacatgtcgctactggagaattttggctgaagacaaccttctctggagagagaaatgcaaagaagaggggattgatgaaccattgcacatcaagagaagaaaagtaataaaaccaggtttcatacacagtccatggaaaagtgcatacatcagacagcacagaattgatactaactcgaggcgaggaggcagcggcagcgatgacctaggcgccaacgacgaactgatttccttcaaagacgagggcgaacaggaggagaagagctccgaaaactcctcggcagagagggatttagctgatgtcaaatcgtctctagtcaatgaatcagaaacgtaa

SEQ ID NO: 1724 - DNA, 1287 bp, synthetic construct
  source 1..1287: mol_type = other DNA; note = HA-FBXW7a-(GS)3-TCF4 nucleic acid
atgtacccatacgatgttccagattacgctaatcaggaactgctctctgtgggcagcaaaagacgacgaactggaggctctctgagaggtaacccttcctcaagccaggtagatgaagaacagatgaatcgtgtggtagaggaggaacagcaacagcaactcagacaacaagaggaggagcacactgcaaggaatggtgaagttgttggagtagaacctagacctggaggccaaaatgattcccagcaaggacagttggaagaaaacaataatagatttatttcggtagatgaggactcctcaggaaaccaagaagaacaagaggaagatgaagaacatgctggtgaacaagatgaggaggatgaggaggaggaggagatggaccaggagagtgacgattttgatcagtctgatgatagtagcagagaagatgaacatacacatactaacagtgtcacgaactccagtagtattgtggacctgcccgttcaccaactctcctccccattctatacaaaaacaacaaaaatgaaaagaaagttggaccatggttctgaggtccgctctttttctttgggaaagaaaccatgcaaagtctcagaatatacaagtaccactgggcttgtaccatgttcagcaacaccaacaacttttggggacctcagagcagccaatggccaagggcaacaacgacgccgaattacatctgtccagccacctacaggcctccaggaatggctaaaaatgtttcagagctggagtggaccagagaaattgcttgctttagatgaactcattgatagttgtgaaccaacacaagtaaaacatatgatgcaagtgatagaaccccagtttcaacgagacttcatttcattgctccctaaagagttggcactctatgtgctttcattcctggaacccaaagacctgctacaagcagctcagacatgtcgctactggagaattttggctgaagacaaccttctctggagagagaaatgcaaagaagaggggattgatgaaccattgcacatcaagagaagaaaagtaataaaaccaggtttcatacacagtccatggaaaagtgcatacatcagacagcacagaattgatactaactcgaggcgaggaggcagcggcagcggcagcgatgacctaggcgccaacgacgaactgatttccttcaaagacgagggcgaacaggaggagaagagctccgaaaactcctcggcagagagggatttagctgatgtcaaatcgtctctagtcaatgaatcagaaacgtaa

SEQ ID NO: 1725 - DNA, 1293 bp, synthetic construct
  source 1..1293: mol_type = other DNA; note = HA-FBXW7a-(GS)4-TCF4 nucleic acid
atgtacccatacgatgttccagattacgctaatcaggaactgctctctgtgggcagcaaaagacgacgaactggaggctctctgagaggtaacccttcctcaagccaggtagatgaagaacagatgaatcgtgtggtagaggaggaacagcaacagcaactcagacaacaagaggaggagcacactgcaaggaatggtgaagttgttggagtagaacctagacctggaggccaaaatgattcccagcaaggacagttggaagaaaacaataatagatttatttcggtagatgaggactcctcaggaaaccaagaagaacaagaggaagatgaagaacatgctggtgaacaagatgaggaggatgaggaggaggaggagatggaccaggagagtgacgattttgatcagtctgatgatagtagcagagaagatgaacatacacatactaacagtgtcacgaactccagtagtattgtggacctgcccgttcaccaactctcctccccattctatacaaaaacaacaaaaatgaaaagaaagttggaccatggttctgaggtccgctctttttctttgggaaagaaaccatgcaaagtctcagaatatacaagtaccactgggcttgtaccatgttcagcaacaccaacaacttttggggacctcagagcagccaatggccaagggcaacaacgacgccgaattacatctgtccagccacctacaggcctccaggaatggctaaaaatgtttcagagctggagtggaccagagaaattgcttgctttagatgaactcattgatagttgtgaaccaacacaagtaaaacatatgatgcaagtgatagaaccccagtttcaacgagacttcatttcattgctccctaaagagttggcactctatgtgctttcattcctggaacccaaagacctgctacaagcagctcagacatgtcgctactggagaattttggctgaagacaaccttctctggagagagaaatgcaaagaagaggggattgatgaaccattgcacatcaagagaagaaaagtaataaaaccaggtttcatacacagtccatggaaaagtgcatacatcagacagcacagaattgatactaactcgaggcgaggaggcagcggcagcggcagcggcagcgatgacctaggcgccaacgacgaactgatttccttcaaagacgagggcgaacaggaggagaagagctccgaaaactcctcggcagagagggatttagctgatgtcaaatcgtctctagtcaatgaatcagaaacgtaa

SEQ ID NO: 1726 - DNA, 1299 bp, synthetic construct
  source 1..1299: mol_type = other DNA; note = HA-FBXW7a-(GS)5-TCF4 nucleic acid
atgtacccatacgatgttccagattacgctaatcaggaactgctctctgtgggcagcaaaagacgacgaactggaggctctctgagaggtaacccttcctcaagccaggtagatgaagaacagatgaatcgtgtggtagaggaggaacagcaacagcaactcagacaacaagaggaggagcacactgcaaggaatggtgaagttgttggagtagaacctagacctggaggccaaaatgattcccagcaaggacagttggaagaaaacaataatagatttatttcggtagatgaggactcctcaggaaaccaagaagaacaagaggaagatgaagaacatgctggtgaacaagatgaggaggatgaggaggaggaggagatggaccaggagagtgacgattttgatcagtctgatgatagtagcagagaagatgaacatacacatactaacagtgtcacgaactccagtagtattgtggacctgcccgttcaccaactctcctccccattctatacaaaaacaacaaaaatgaaaagaaagttggaccatggttctgaggtccgctctttttctttgggaaagaaaccatgcaaagtctcagaatatacaagtaccactgggcttgtaccatgttcagcaacaccaacaacttttggggacctcagagcagccaatggccaagggcaacaacgacgccgaattacatctgtccagccacctacaggcctccaggaatggctaaaaatgtttcagagctggagtggaccagagaaattgcttgctttagatgaactcattgatagttgtgaaccaacacaagtaaaacatatgatgcaagtgatagaaccccagtttcaacgagacttcatttcattgctccctaaagagttggcactctatgtgctttcattcctggaacccaaagacctgctacaagcagctcagacatgtcgctactggagaattttggctgaagacaaccttctctggagagagaaatgcaaagaagaggggattgatgaaccattgcacatcaagagaagaaaagtaataaaaccaggtttcatacacagtccatggaaaagtgcatacatcagacagcacagaattgatactaactcgaggcgaggaggcagcggcagcggcagcggcagcggcagcgatgacctaggcgccaacgacgaactgatttccttcaaagacgagggcgaacaggaggagaagagctccgaaaactcctcggcagagagggatttagctgatgtcaaatcgtctctagtcaatgaatcagaaacgtaa

SEQ ID NO: 1727 - DNA, 1305 bp, synthetic construct
  source 1..1305: mol_type = other DNA; note = HA-FBXW7a-(GS)6-TCF4 nucleic acid
atgtacccatacgatgttccagattacgctaatcaggaactgctctctgtgggcagcaaaagacgacgaactggaggctctctgagaggtaacccttcctcaagccaggtagatgaagaacagatgaatcgtgtggtagaggaggaacagcaacagcaactcagacaacaagaggaggagcacactgcaaggaatggtgaagttgttggagtagaacctagacctggaggccaaaatgattcccagcaaggacagttggaagaaaacaataatagatttatttcggtagatgaggactcctcaggaaaccaagaagaacaagaggaagatgaagaacatgctggtgaacaagatgaggaggatgaggaggaggaggagatggaccaggagagtgacgattttgatcagtctgatgatagtagcagagaagatgaacatacacatactaacagtgtcacgaactccagtagtattgtggacctgcccgttcaccaactctcctccccattctatacaaaaacaacaaaaatgaaaagaaagttggaccatggttctgaggtccgctctttttctttgggaaagaaaccatgcaaagtctcagaatatacaagtaccactgggcttgtaccatgttcagcaacaccaacaacttttggggacctcagagcagccaatggccaagggcaacaacgacgccgaattacatctgtccagccacctacaggcctccaggaatggctaaaaatgtttcagagctggagtggaccagagaaattgcttgctttagatgaactcattgatagttgtgaaccaacacaagtaaaacatatgatgcaagtgatagaaccccagtttcaacgagacttcatttcattgctccctaaagagttggcactctatgtgctttcattcctggaacccaaagacctgctacaagcagctcagacatgtcgctactggagaattttggctgaagacaaccttctctggagagagaaatgcaaagaagaggggattgatgaaccattgcacatcaagagaagaaaagtaataaaaccaggtttcatacacagtccatggaaaagtgcatacatcagacagcacagaattgatactaactcgaggcgaggaggcagcggcagcggcagcggcagcggcagcggcagcgatgacctaggcgccaacgacgaactgatttccttcaaagacgagggcgaacaggaggagaagagctccgaaaactcctcggcagagagggatttagctgatgtcaaatcgtctctagtcaatgaatcagaaacgtaa

SEQ ID NO: 1728 - DNA, 1152 bp, synthetic construct
  source 1..1152: mol_type = other DNA; note = NLS-Keap1-(GS)1-TCF4 nucleic acid
ccggcggcgaaacgcgtgaaactggatggcagcggcagcggcagccagccagatcccaggcctagcggggctggggcctgctgccgattcctgcccctgcagtcacagtgccctgagggggcaggggacgcggtgatgtacgcctccactgagtgcaaggcggaggtgacgccctcccagcatggcaaccgcaccttcagctacaccctggaggatcataccaagcaggcctttggcatcatgaacgagctgcggctcagccagcagctgtgtgacgtcacactgcaggtcaagtaccaggatgcaccggccgcccagttcatggcccacaaggtggtgctggcctcatccagccctgtcttcaaggccatgttcaccaacgggctgcgggagcagggcatggaggtggtgtccattgagggtatccaccccaaggtcatggagcgcctcattgaattcgcctacacggcctccatctccatgggcgagaagtgtgtcctccacgtcatgaacggtgctgtcatgtaccagatcgacagcgttgtccgtgcctgcagtgacttcctggtgcagcagctggaccccagcaatgccatcggcatcgccaacttcgctgagcagattggctgtgtggagttgcaccagcgtgcccgggagtacatctacatgcattttggggaggtggccaagcaagaggagttcttcaacctgtcccactgccaactggtgaccctcatcagccgggacgacctgaacgtgcgctgcgagtccgaggtcttccacgcctgcatcaactgggtcaagtacgactgcgaacagcgacggttctacgtccaggcgctgctgcgggccgtgcgctgccactcgttgacgccgaacttcctgcagatgcagctgcagaagtgcgagatcctgcagtccgactcccgctgcaaggactacctggtcaagatcttcgaggagctcaccctgcacaagcccacgcaggtgatgccctgccgggcgcccggcagcgatgacctaggcgccaacgacgaactgatttccttcaaagacgagggcgaacaggaggagaagagctccgaaaactcctcggcagagagggatttagctgatgtcaaatcgtctctagtcaatgaatcagaaacgtaa

SEQ ID NO: 1729 - DNA, 1158 bp, synthetic construct
  source 1..1158: mol_type = other DNA; note = NLS-Keap1-(GS)2-TCF4 nucleic acid
ccggcggcgaaacgcgtgaaactggatggcagcggcagcggcagccagccagatcccaggcctagcggggctggggcctgctgccgattcctgcccctgcagtcacagtgccctgagggggcaggggacgcggtgatgtacgcctccactgagtgcaaggcggaggtgacgccctcccagcatggcaaccgcaccttcagctacaccctggaggatcataccaagcaggcctttggcatcatgaacgagctgcggctcagccagcagctgtgtgacgtcacactgcaggtcaagtaccaggatgcaccggccgcccagttcatggcccacaaggtggtgctggcctcatccagccctgtcttcaaggccatgttcaccaacgggctgcgggagcagggcatggaggtggtgtccattgagggtatccaccccaaggtcatggagcgcctcattgaattcgcctacacggcctccatctccatgggcgagaagtgtgtcctccacgtcatgaacggtgctgtcatgtaccagatcgacagcgttgtccgtgcctgcagtgacttcctggtgcagcagctggaccccagcaatgccatcggcatcgccaacttcgctgagcagattggctgtgtggagttgcaccagcgtgcccgggagtacatctacatgcattttggggaggtggccaagcaagaggagttcttcaacctgtcccactgccaactggtgaccctcatcagccgggacgacctgaacgtgcgctgcgagtccgaggtcttccacgcctgcatcaactgggtcaagtacgactgcgaacagcgacggttctacgtccaggcgctgctgcgggccgtgcgctgccactcgttgacgccgaacttcctgcagatgcagctgcagaagtgcgagatcctgcagtccgactcccgctgcaaggactacctggtcaagatcttcgaggagctcaccctgcacaagcccacgcaggtgatgccctgccgggcgcccggcagcggcagcgatgacctaggcgccaacgacgaactgatttccttcaaagacgagggcgaacaggaggagaagagctccgaaaactcctcggcagagagggatttagctgatgtcaaatcgtctctagtcaatgaatcagaaacgtaa

SEQ ID NO: 1730 - DNA, 1164 bp, synthetic construct
  source 1..1164: mol_type = other DNA; note = NLS-Keap1-(GS)3-TCF4 nucleic acid
ccggcggcgaaacgcgtgaaactggatggcagcggcagcggcagccagccagatcccaggcctagcggggctggggcctgctgccgattcctgcccctgcagtcacagtgccctgagggggcaggggacgcggtgatgtacgcctccactgagtgcaaggcggaggtgacgccctcccagcatggcaaccgcaccttcagctacaccctggaggatcataccaagcaggcctttggcatcatgaacgagctgcggctcagccagcagctgtgtgacgtcacactgcaggtcaagtaccaggatgcaccggccgcccagttcatggcccacaaggtggtgctggcctcatccagccctgtcttcaaggccatgttcaccaacgggctgcgggagcagggcatggaggtggtgtccattgagggtatccaccccaaggtcatggagcgcctcattgaattcgcctacacggcctccatctccatgggcgagaagtgtgtcctccacgtcatgaacggtgctgtcatgtaccagatcgacagcgttgtccgtgcctgcagtgacttcctggtgcagcagctggaccccagcaatgccatcggcatcgccaacttcgctgagcagattggctgtgtggagttgcaccagcgtgcccgggagtacatctacatgcattttggggaggtggccaagcaagaggagttcttcaacctgtcccactgccaactggtgaccctcatcagccgggacgacctgaacgtgcgctgcgagtccgaggtcttccacgcctgcatcaactgggtcaagtacgactgcgaacagcgacggttctacgtccaggcgctgctgcgggccgtgcgctgccactcgttgacgccgaacttcctgcagatgcagctgcagaagtgcgagatcctgcagtccgactcccgctgcaaggactacctggtcaagatcttcgaggagctcaccctgcacaagcccacgcaggtgatgccctgccgggcgcccggcagcggcagcggcagcgatgacctaggcgccaacgacgaactgatttccttcaaagacgagggcgaacaggaggagaagagctccgaaaactcctcggcagagagggatttagctgatgtcaaatcgtctctagtcaatgaatcagaaacgtaa

SEQ ID NO: 1731 - DNA, 1170 bp, synthetic construct
  source 1..1170: mol_type = other DNA; note = NLS-Keap1-(GS)4-TCF4 nucleic acid
ccggcggcgaaacgcgtgaaactggatggcagcggcagcggcagccagccagatcccaggcctagcggggctggggcctgctgccgattcctgcccctgcagtcacagtgccctgagggggcaggggacgcggtgatgtacgcctccactgagtgcaaggcggaggtgacgccctcccagcatggcaaccgcaccttcagctacaccctggaggatcataccaagcaggcctttggcatcatgaacgagctgcggctcagccagcagctgtgtgacgtcacactgcaggtcaagtaccaggatgcaccggccgcccagttcatggcccacaaggtggtgctggcctcatccagccctgtcttcaaggccatgttcaccaacgggctgcgggagcagggcatggaggtggtgtccattgagggtatccaccccaaggtcatggagcgcctcattgaattcgcctacacggcctccatctccatgggcgagaagtgtgtcctccacgtcatgaacggtgctgtcatgtaccagatcgacagcgttgtccgtgcctgcagtgacttcctggtgcagcagctggaccccagcaatgccatcggcatcgccaacttcgctgagcagattggctgtgtggagttgcaccagcgtgcccgggagtacatctacatgcattttggggaggtggccaagcaagaggagttcttcaacctgtcccactgccaactggtgaccctcatcagccgggacgacctgaacgtgcgctgcgagtccgaggtcttccacgcctgcatcaactgggtcaagtacgactgcgaacagcgacggttctacgtccaggcgctgctgcgggccgtgcgctgccactcgttgacgccgaacttcctgcagatgcagctgcagaagtgcgagatcctgcagtccgactcccgctgcaaggactacctggtcaagatcttcgaggagctcaccctgcacaagcccacgcaggtgatgccctgccgggcgcccggcagcggcagcggcagcggcagcgatgacctaggcgccaacgacgaactgatttccttcaaagacgagggcgaacaggaggagaagagctccgaaaactcctcggcagagagggatttagctgatgtcaaatcgtctctagtcaatgaatcagaaacgtaa

SEQ ID NO: 1732 - DNA, 1176 bp, synthetic construct
  source 1..1176: mol_type = other DNA; note = NLS-Keap1-(GS)5-TCF4 nucleic acid
ccggcggcgaaacgcgtgaaactggatggcagcggcagcggcagccagccagatcccaggcctagcggggctggggcctgctgccgattcctgcccctgcagtcacagtgccctgagggggcaggggacgcggtgatgtacgcctccactgagtgcaaggcggaggtgacgccctcccagcatggcaaccgcaccttcagctacaccctggaggatcataccaagcaggcctttggcatcatgaacgagctgcggctcagccagcagctgtgtgacgtcacactgcaggtcaagtaccaggatgcaccggccgcccagttcatggcccacaaggtggtgctggcctcatccagccctgtcttcaaggccatgttcaccaacgggctgcgggagcagggcatggaggtggtgtccattgagggtatccaccccaaggtcatggagcgcctcattgaattcgcctacacggcctccatctccatgggcgagaagtgtgtcctccacgtcatgaacggtgctgtcatgtaccagatcgacagcgttgtccgtgcctgcagtgacttcctggtgcagcagctggaccccagcaatgccatcggcatcgccaacttcgctgagcagattggctgtgtggagttgcaccagcgtgcccgggagtacatctacatgcattttggggaggtggccaagcaagaggagttcttcaacctgtcccactgccaactggtgaccctcatcagccgggacgacctgaacgtgcgctgcgagtccgaggtcttccacgcctgcatcaactgggtcaagtacgactgcgaacagcgacggttctacgtccaggcgctgctgcgggccgtgcgctgccactcgttgacgccgaacttcctgcagatgcagctgcagaagtgcgagatcctgcagtccgactcccgctgcaaggactacctggtcaagatcttcgaggagctcaccctgcacaagcccacgcaggtgatgccctgccgggcgcccggcagcggcagcggcagcggcagcggcagcgatgacctaggcgccaacgacgaactgatttccttcaaagacgagggcgaacaggaggagaagagctccgaaaactcctcggcagagagggatttagctgatgtcaaatcgtctctagtcaatgaatcagaaacgtaa

SEQ ID NO: 1733 - DNA, 1182 bp, synthetic construct
  source 1..1182: mol_type = other DNA; note = NLS-Keap1-(GS)6-TCF4 nucleic acid
ccggcggcgaaacgcgtgaaactggatggcagcggcagcggcagccagccagatcccaggcctagcggggctggggcctgctgccgattcctgcccctgcagtcacagtgccctgagggggcaggggacgcggtgatgtacgcctccactgagtgcaaggcggaggtgacgccctcccagcatggcaaccgcaccttcagctacaccctggaggatcataccaagcaggcctttggcatcatgaacgagctgcggctcagccagcagctgtgtgacgtcacactgcaggtcaagtaccaggatgcaccggccgcccagttcatggcccacaaggtggtgctggcctcatccagccctgtcttcaaggccatgttcaccaacgggctgcgggagcagggcatggaggtggtgtccattgagggtatccaccccaaggtcatggagcgcctcattgaattcgcctacacggcctccatctccatgggcgagaagtgtgtcctccacgtcatgaacggtgctgtcatgtaccagatcgacagcgttgtccgtgcctgcagtgacttcctggtgcagcagctggaccccagcaatgccatcggcatcgccaacttcgctgagcagattggctgtgtggagttgcaccagcgtgcccgggagtacatctacatgcattttggggaggtggccaagcaagaggagttcttcaacctgtcccactgccaactggtgaccctcatcagccgggacgacctgaacgtgcgctgcgagtccgaggtcttccacgcctgcatcaactgggtcaagtacgactgcgaacagcgacggttctacgtccaggcgctgctgcgggccgtgcgctgccactcgttgacgccgaacttcctgcagatgcagctgcagaagtgcgagatcctgcagtccgactcccgctgcaaggactacctggtcaagatcttcgaggagctcaccctgcacaagcccacgcaggtgatgccctgccgggcgcccggcagcggcagcggcagcggcagcggcagcggcagcgatgacctaggcgccaacgacgaactgatttccttcaaagacgagggcgaacaggaggagaagagctccgaaaactcctcggcagagagggatttagctgatgtcaaatcgtctctagtcaatgaatcagaaacgtaa

SEQ ID NO: 1734 - DNA, 1182 bp, synthetic construct
  source 1..1182: mol_type = other DNA; note = HA-NLS-Keap1-(GS)1-TCF4 nucleic acid
atgtacccatacgatgttccagattacgctccggcggcgaaacgcgtgaaactggatggcagcggcagcggcagccagccagatcccaggcctagcggggctggggcctgctgccgattcctgcccctgcagtcacagtgccctgagggggcaggggacgcggtgatgtacgcctccactgagtgcaaggcggaggtgacgccctcccagcatggcaaccgcaccttcagctacaccctggaggatcataccaagcaggcctttggcatcatgaacgagctgcggctcagccagcagctgtgtgacgtcacactgcaggtcaagtaccaggatgcaccggccgcccagttcatggcccacaaggtggtgctggcctcatccagccctgtcttcaaggccatgttcaccaacgggctgcgggagcagggcatggaggtggtgtccattgagggtatccaccccaaggtcatggagcgcctcattgaattcgcctacacggcctccatctccatgggcgagaagtgtgtcctccacgtcatgaacggtgctgtcatgtaccagatcgacagcgttgtccgtgcctgcagtgacttcctggtgcagcagctggaccccagcaatgccatcggcatcgccaacttcgctgagcagattggctgtgtggagttgcaccagcgtgcccgggagtacatctacatgcattttggggaggtggccaagcaagaggagttcttcaacctgtcccactgccaactggtgaccctcatcagccgggacgacctgaacgtgcgctgcgagtccgaggtcttccacgcctgcatcaactgggtcaagtacgactgcgaacagcgacggttctacgtccaggcgctgctgcgggccgtgcgctgccactcgttgacgccgaacttcctgcagatgcagctgcagaagtgcgagatcctgcagtccgactcccgctgcaaggactacctggtcaagatcttcgaggagctcaccctgcacaagcccacgcaggtgatgccctgccgggcgcccggcagcgatgacctaggcgccaacgacgaactgatttccttcaaagacgagggcgaacaggaggagaagagctccgaaaactcctcggcagagagggatttagctgatgtcaaatcgtctctagtcaatgaatcagaaacgtaa

SEQ ID NO: 1735 - DNA, 1188 bp, synthetic construct
  source 1..1188: mol_type = other DNA; note = HA-NLS-Keap1-(GS)2-TCF4 nucleic acid
atgtacccatacgatgttccagattacgctccggcggcgaaacgcgtgaaactggatggcagcggcagcggcagccagccagatcccaggcctagcggggctggggcctgctgccgattcctgcccctgcagtcacagtgccctgagggggcaggggacgcggtgatgtacgcctccactgagtgcaaggcggaggtgacgccctcccagcatggcaaccgcaccttcagctacaccctggaggatcataccaagcaggcctttggcatcatgaacgagctgcggctcagccagcagctgtgtgacgtcacactgcaggtcaagtaccaggatgcaccggccgcccagttcatggcccacaaggtggtgctggcctcatccagccctgtcttcaaggccatgttcaccaacgggctgcgggagcagggcatggaggtggtgtccattgagggtatccaccccaaggtcatggagcgcctcattgaattcgcctacacggcctccatctccatgggcgagaagtgtgtcctccacgtcatgaacggtgctgtcatgtaccagatcgacagcgttgtccgtgcctgcagtgacttcctggtgcagcagctggaccccagcaatgccatcggcatcgccaacttcgctgagcagattggctgtgtggagttgcaccagcgtgcccgggagtacatctacatgcattttggggaggtggccaagcaagaggagttcttcaacctgtcccactgccaactggtgaccctcatcagccgggacgacctgaacgtgcgctgcgagtccgaggtcttccacgcctgcatcaactgggtcaagtacgactgcgaacagcgacggttctacgtccaggcgctgctgcgggccgtgcgctgccactcgttgacgccgaacttcctgcagatgcagctgcagaagtgcgagatcctgcagtccgactcccgctgcaaggactacctggtcaagatcttcgaggagctcaccctgcacaagcccacgcaggtgatgccctgccgggcgcccggcagcggcagcgatgacctaggcgccaacgacgaactgatttccttcaaagacgagggcgaacaggaggagaagagctccgaaaactcctcggcagagagggatttagctgatgtcaaatcgtctctagtcaatgaatcagaaacgtaa

SEQ ID NO: 1736 - DNA, 1194 bp, synthetic construct
  source 1..1194: mol_type = other DNA; note = HA-NLS-Keap1-(GS)3-TCF4 nucleic acid
atgtacccatacgatgttccagattacgctccggcggcgaaacgcgtgaaactggatggcagcggcagcggcagccagccagatcccaggcctagcggggctggggcctgctgccgattcctgcccctgcagtcacagtgccctgagggggcaggggacgcggtgatgtacgcctccactgagtgcaaggcggaggtgacgccctcccagcatggcaaccgcaccttcagctacaccctggaggatcataccaagcaggcctttggcatcatgaacgagctgcggctcagccagcagctgtgtgacgtcacactgcaggtcaagtaccaggatgcaccggccgcccagttcatggcccacaaggtggtgctggcctcatccagccctgtcttcaaggccatgttcaccaacgggctgcgggagcagggcatggaggtggtgtccattgagggtatccaccccaaggtcatggagcgcctcattgaattcgcctacacggcctccatctccatgggcgagaagtgtgtcctccacgtcatgaacggtgctgtcatgtaccagatcgacagcgttgtccgtgcctgcagtgacttcctggtgcagcagctggaccccagcaatgccatcggcatcgccaacttcgctgagcagattggctgtgtggagttgcaccagcgtgcccgggagtacatctacatgcattttggggaggtggccaagcaagaggagttcttcaacctgtcccactgccaactggtgaccctcatcagccgggacgacctgaacgtgcgctgcgagtccgaggtcttccacgcctgcatcaactgggtcaagtacgactgcgaacagcgacggttctacgtccaggcgctgctgcgggccgtgcgctgccactcgttgacgccgaacttcctgcagatgcagctgcagaagtgcgagatcctgcagtccgactcccgctgcaaggactacctggtcaagatcttcgaggagctcaccctgcacaagcccacgcaggtgatgccctgccgggcgcccggcagcggcagcggcagcgatgacctaggcgccaacgacgaactgatttccttcaaagacgagggcgaacaggaggagaagagctccgaaaactcctcggcagagagggatttagctgatgtcaaatcgtctctagtcaatgaatcagaaacgtaa

SEQ ID NO: 1737 - DNA, 1200 bp, synthetic construct
  source 1..1200: mol_type = other DNA; note = HA-NLS-Keap1-(GS)4-TCF4 nucleic acid
atgtacccatacgatgttccagattacgctccggcggcgaaacgcgtgaaactggatggcagcggcagcggcagccagccagatcccaggcctagcggggctggggcctgctgccgattcctgcccctgcagtcacagtgccctgagggggcaggggacgcggtgatgtacgcctccactgagtgcaaggcggaggtgacgccctcccagcatggcaaccgcaccttcagctacaccctggaggatcataccaagcaggcctttggcatcatgaacgagctgcggctcagccagcagctgtgtgacgtcacactgcaggtcaagtaccaggatgcaccggccgcccagttcatggcccacaaggtggtgctggcctcatccagccctgtcttcaaggccatgttcaccaacgggctgcgggagcagggcatggaggtggtgtccattgagggtatccaccccaaggtcatggagcgcctcattgaattcgcctacacggcctccatctccatgggcgagaagtgtgtcctccacgtcatgaacggtgctgtcatgtaccagatcgacagcgttgtccgtgcctgcagtgacttcctggtgcagcagctggaccccagcaatgccatcggcatcgccaacttcgctgagcagattggctgtgtggagttgcaccagcgtgcccgggagtacatctacatgcattttggggaggtggccaagcaagaggagttcttcaacctgtcccactgccaactggtgaccctcatcagccgggacgacctgaacgtgcgctgcgagtccgaggtcttccacgcctgcatcaactgggtcaagtacgactgcgaacagcgacggttctacgtccaggcgctgctgcgggccgtgcgctgccactcgttgacgccgaacttcctgcagatgcagctgcagaagtgcgagatcctgcagtccgactcccgctgcaaggactacctggtcaagatcttcgaggagctcaccctgcacaagcccacgcaggtgatgccctgccgggcgcccggcagcggcagcggcagcggcagcgatgacctaggcgccaacgacgaactgatttccttcaaagacgagggcgaacaggaggagaagagctccgaaaactcctcggcagagagggatttagctgatgtcaaatcgtctctagtcaatgaatcagaaacgtaa

SEQ ID NO: 1738 - DNA, 1206 bp, synthetic construct
  source 1..1206: mol_type = other DNA; note = HA-NLS-Keap1-(GS)5-TCF4 nucleic acid
atgtacccatacgatgttccagattacgctccggcggcgaaacgcgtgaaactggatggcagcggcagcggcagccagccagatcccaggcctagcggggctggggcctgctgccgattcctgcccctgcagtcacagtgccctgagggggcaggggacgcggtgatgtacgcctccactgagtgcaaggcggaggtgacgccctcccagcatggcaaccgcaccttcagctacaccctggaggatcataccaagcaggcctttggcatcatgaacgagctgcggctcagccagcagctgtgtgacgtcacactgcaggtcaagtaccaggatgcaccggccgcccagttcatggcccacaaggtggtgctggcctcatccagccctgtcttcaaggccatgttcaccaacgggctgcgggagcagggcatggaggtggtgtccattgagggtatccaccccaaggtcatggagcgcctcattgaattcgcctacacggcctccatctccatgggcgagaagtgtgtcctccacgtcatgaacggtgctgtcatgtaccagatcgacagcgttgtccgtgcctgcagtgacttcctggtgcagcagctggaccccagcaatgccatcggcatcgccaacttcgctgagcagattggctgtgtggagttgcaccagcgtgcccgggagtacatctacatgcattttggggaggtggccaagcaagaggagttcttcaacctgtcccactgccaactggtgaccctcatcagccgggacgacctgaacgtgcgctgcgagtccgaggtcttccacgcctgcatcaactgggtcaagtacgactgcgaacagcgacggttctacgtccaggcgctgctgcgggccgtgcgctgccactcgttgacgccgaacttcctgcagatgcagctgcagaagtgcgagatcctgcagtccgactcccgctgcaaggactacctggtcaagatcttcgaggagctcaccctgcacaagcccacgcaggtgatgccctgccgggcgcccggcagcggcagcggcagcggcagcggcagcgatgacctaggcgccaacgacgaactgatttccttcaaagacgagggcgaacaggaggagaagagctccgaaaactcctcggcagagagggatttagctgatgtcaaatcgtctctagtcaatgaatcagaaacgtaa

SEQ ID NO: 1739 - DNA, 1212 bp, synthetic construct
  source 1..1212: mol_type = other DNA; note = HA-NLS-Keap1-(GS)6-TCF4 nucleic acid
atgtacccatacgatgttccagattacgctccggcggcgaaacgcgtgaaactggatggcagcggcagcggcagccagccagatcccaggcctagcggggctggggcctgctgccgattcctgcccctgcagtcacagtgccctgagggggcaggggacgcggtgatgtacgcctccactgagtgcaaggcggaggtgacgccctcccagcatggcaaccgcaccttcagctacaccctggaggatcataccaagcaggcctttggcatcatgaacgagctgcggctcagccagcagctgtgtgacgtcacactgcaggtcaagtaccaggatgcaccggccgcccagttcatggcccacaaggtggtgctggcctcatccagccctgtcttcaaggccatgttcaccaacgggctgcgggagcagggcatggaggtggtgtccattgagggtatccaccccaaggtcatggagcgcctcattgaattcgcctacacggcctccatctccatgggcgagaagtgtgtcctccacgtcatgaacggtgctgtcatgtaccagatcgacagcgttgtccgtgcctgcagtgacttcctggtgcagcagctggaccccagcaatgccatcggcatcgccaacttcgctgagcagattggctgtgtggagttgcaccagcgtgcccgggagtacatctacatgcattttggggaggtggccaagcaagaggagttcttcaacctgtcccactgccaactggtgaccctcatcagccgggacgacctgaacgtgcgctgcgagtccgaggtcttccacgcctgcatcaactgggtcaagtacgactgcgaacagcgacggttctacgtccaggcgctgctgcgggccgtgcgctgccactcgttgacgccgaacttcctgcagatgcagctgcagaagtgcgagatcctgcagtccgactcccgctgcaaggactacctggtcaagatcttcgaggagctcaccctgcacaagcccacgcaggtgatgccctgccgggcgcccggcagcggcagcggcagcggcagcggcagcggcagcgatgacctaggcgccaacgacgaactgatttccttcaaagacgagggcgaacaggaggagaagagctccgaaaactcctcggcagagagggatttagctgatgtcaaatcgtctctagtcaatgaatcagaaacgtaa

SEQ ID NO: 1740 - DNA, 570 bp, synthetic construct
  source 1..570: mol_type = other DNA; note = NLS-RNF125-(GS)1-TCF4 nucleic acid
ccggcggcgaaacgcgtgaaactggatggcagcggcagcggcagcggctccgtgctgagcaccgacagcggcaaatcggcgcccgcctctgccaccgcgcgggccctggagcgcaggagggacccggagttgcccgtcacgtccttcgactgcgccgtgtgccttgaggtgttacaccagcctgtccggacccgctgcggccacgtattctgccgttcctgtattgctaccagtctgaagaacaacaagtggacctgtccttattgccgggcatatcttccttcagaaggagttccagcaactgatgtagccaaaagaatgaaatcagagtataagaactgcgctgagtgtgacaccctggtttgcctcagtgaaatgagggcacatattcggacttgtcagaagtacatagataagtatggaccaggcagcgatgacctaggcgccaacgacgaactgatttccttcaaagacgagggcgaacaggaggagaagagctccgaaaactcctcggcagagagggatttagctgatgtcaaatcgtctctagtcaatgaatcagaaacgtaa

SEQ ID NO: 1741 - DNA, 576 bp, synthetic construct
  source 1..576: mol_type = other DNA; note = NLS-RNF125-(GS)2-TCF4 nucleic acid
ccggcggcgaaacgcgtgaaactggatggcagcggcagcggcagcggctccgtgctgagcaccgacagcggcaaatcggcgcccgcctctgccaccgcgcgggccctggagcgcaggagggacccggagttgcccgtcacgtccttcgactgcgccgtgtgccttgaggtgttacaccagcctgtccggacccgctgcggccacgtattctgccgttcctgtattgctaccagtctgaagaacaacaagtggacctgtccttattgccgggcatatcttccttcagaaggagttccagcaactgatgtagccaaaagaatgaaatcagagtataagaactgcgctgagtgtgacaccctggtttgcctcagtgaaatgagggcacatattcggacttgtcagaagtacatagataagtatggaccaggcagcggcagcgatgacctaggcgccaacgacgaactgatttccttcaaagacgagggcgaacaggaggagaagagctccgaaaactcctcggcagagagggatttagctgatgtcaaatcgtctctagtcaatgaatcagaaacgtaa

SEQ ID NO: 1742 - DNA, 582 bp, synthetic construct
  source 1..582: mol_type = other DNA; note = NLS-RNF125-(GS)3-TCF4 nucleic acid
ccggcggcgaaacgcgtgaaactggatggcagcggcagcggcagcggctccgtgctgagcaccgacagcggcaaatcggcgcccgcctctgccaccgcgcgggccctggagcgcaggagggacccggagttgcccgtcacgtccttcgactgcgccgtgtgccttgaggtgttacaccagcctgtccggacccgctgcggccacgtattctgccgttcctgtattgctaccagtctgaagaacaacaagtggacctgtccttattgccgggcatatcttccttcagaaggagttccagcaactgatgtagccaaaagaatgaaatcagagtataagaactgcgctgagtgtgacaccctggtttgcctcagtgaaatgagggcacatattcggacttgtcagaagtacatagataagtatggaccaggcagcggcagcggcagcgatgacctaggcgccaacgacgaactgatttccttcaaagacgagggcgaacaggaggagaagagctccgaaaactcctcggcagagagggatttagctgatgtcaaatcgtctctagtcaatgaatcagaaacgtaa

SEQ ID NO: 1743 - DNA, 588 bp, synthetic construct
  source 1..588: mol_type = other DNA; note = NLS-RNF125-(GS)4-TCF4 nucleic acid
ccggcggcgaaacgcgtgaaactggatggcagcggcagcggcagcggctccgtgctgagcaccgacagcggcaaatcggcgcccgcctctgccaccgcgcgggccctggagcgcaggagggacccggagttgcccgtcacgtccttcgactgcgccgtgtgccttgaggtgttacaccagcctgtccggacccgctgcggccacgtattctgccgttcctgtattgctaccagtctgaagaacaacaagtggacctgtccttattgccgggcatatcttccttcagaaggagttccagcaactgatgtagccaaaagaatgaaatcagagtataagaactgcgctgagtgtgacaccctggtttgcctcagtgaaatgagggcacatattcggacttgtcagaagtacatagataagtatggaccaggcagcggcagcggcagcggcagcgatgacctaggcgccaacgacgaactgatttccttcaaagacgagggcgaacaggaggagaagagctccgaaaactcctcggcagagagggatttagctgatgtcaaatcgtctctagtcaatgaatcagaaacgtaa

SEQ ID NO: 1744 - DNA, 594 bp, synthetic construct
  source 1..594: mol_type = other DNA; note = NLS-RNF125-(GS)5-TCF4 nucleic acid
ccggcggcgaaacgcgtgaaactggatggcagcggcagcggcagcggctccgtgctgagcaccgacagcggcaaatcggcgcccgcctctgccaccgcgcgggccctggagcgcaggagggacccggagttgcccgtcacgtccttcgactgcgccgtgtgccttgaggtgttacaccagcctgtccggacccgctgcggccacgtattctgccgttcctgtattgctaccagtctgaagaacaacaagtggacctgtccttattgccgggcatatcttccttcagaaggagttccagcaactgatgtagccaaaagaatgaaatcagagtataagaactgcgctgagtgtgacaccctggtttgcctcagtgaaatgagggcacatattcggacttgtcagaagtacatagataagtatggaccaggcagcggcagcggcagcggcagcggcagcgatgacctaggcgccaacgacgaactgatttccttcaaagacgagggcgaacaggaggagaagagctccgaaaactcctcggcagagagggatttagctgatgtcaaatcgtctctagtcaatgaatcagaaacgtaa

SEQ ID NO: 1745 - DNA, 600 bp, synthetic construct
  source 1..600: mol_type = other DNA; note = NLS-RNF125-(GS)6-TCF4 nucleic acid
ccggcggcgaaacgcgtgaaactggatggcagcggcagcggcagcggctccgtgctgagcaccgacagcggcaaatcggcgcccgcctctgccaccgcgcgggccctggagcgcaggagggacccggagttgcccgtcacgtccttcgactgcgccgtgtgccttgaggtgttacaccagcctgtccggacccgctgcggccacgtattctgccgttcctgtattgctaccagtctgaagaacaacaagtggacctgtccttattgccgggcatatcttccttcagaaggagttccagcaactgatgtagccaaaagaatgaaatcagagtataagaactgcgctgagtgtgacaccctggtttgcctcagtgaaatgagggcacatattcggacttgtcagaagtacatagataagtatggaccaggcagcggcagcggcagcggcagcggcagcggcagcgatgacctaggcgccaacgacgaactgatttccttcaaagacgagggcgaacaggaggagaagagctccgaaaactcctcggcagagagggatttagctgatgtcaaatcgtctctagtcaatgaatcagaaacgtaa

SEQ ID NO: 1746 - DNA, 600 bp, synthetic construct
  source 1..600: mol_type = other DNA; note = HA-NLS-RNF125-(GS)1-TCF4 nucleic acid
atgtacccatacgatgttccagattacgctccggcggcgaaacgcgtgaaactggatggcagcggcagcggcagcggctccgtgctgagcaccgacagcggcaaatcggcgcccgcctctgccaccgcgcgggccctggagcgcaggagggacccggagttgcccgtcacgtccttcgactgcgccgtgtgccttgaggtgttacaccagcctgtccggacccgctgcggccacgtattctgccgttcctgtattgctaccagtctgaagaacaacaagtggacctgtccttattgccgggcatatcttccttcagaaggagttccagcaactgatgtagccaaaagaatgaaatcagagtataagaactgcgctgagtgtgacaccctggtttgcctcagtgaaatgagggcacatattcggacttgtcagaagtacatagataagtatggaccaggcagcgatgacctaggcgccaacgacgaactgatttccttcaaagacgagggcgaacaggaggagaagagctccgaaaactcctcggcagagagggatttagctgatgtcaaatcgtctctagtcaatgaatcagaaacgtaa

SEQ ID NO: 1747 - DNA, 606 bp, synthetic construct
  source 1..606: mol_type = other DNA; note = HA-NLS-RNF125-(GS)2-TCF4 nucleic acid
atgtacccatacgatgttccagattacgctccggcggcgaaacgcgtgaaactggatggcagcggcagcggcagcggctccgtgctgagcaccgacagcggcaaatcggcgcccgcctctgccaccgcgcgggccctggagcgcaggagggacccggagttgcccgtcacgtccttcgactgcgccgtgtgccttgaggtgttacaccagcctgtccggacccgctgcggccacgtattctgccgttcctgtattgctaccagtctgaagaacaacaagtggacctgtccttattgccgggcatatcttccttcagaaggagttccagcaactgatgtagccaaaagaatgaaatcagagtataagaactgcgctgagtgtgacaccctggtttgcctcagtgaaatgagggcacatattcggacttgtcagaagtacatagataagtatggaccaggcagcggcagcgatgacctaggcgccaacgacgaactgatttccttcaaagacgagggcgaacaggaggagaagagctccgaaaactcctcggcagagagggatttagctgatgtcaaatcgtctctagtcaatgaatcagaaacgtaa

SEQ ID NO: 1748 - DNA, 612 bp, synthetic construct
  source 1..612: mol_type = other DNA; note = HA-NLS-RNF125-(GS)3-TCF4 nucleic acid
atgtacccatacgatgttccagattacgctccggcggcgaaacgcgtgaaactggatggcagcggcagcggcagcggctccgtgctgagcaccgacagcggcaaatcggcgcccgcctctgccaccgcgcgggccctggagcgcaggagggacccggagttgcccgtcacgtccttcgactgcgccgtgtgccttgaggtgttacaccagcctgtccggacccgctgcggccacgtattctgccgttcctgtattgctaccagtctgaagaacaacaagtggacctgtccttattgccgggcatatcttccttcagaaggagttccagcaactgatgtagccaaaagaatgaaatcagagtataagaactgcgctgagtgtgacaccctggtttgcctcagtgaaatgagggcacatattcggacttgtcagaagtacatagataagtatggaccaggcagcggcagcggcagcgatgacctaggcgccaacgacgaactgatttccttcaaagacgagggcgaacaggaggagaagagctccgaaaactcctcggcagagagggatttagctgatgtcaaatcgtctctagtcaatgaatcagaaacgtaa

SEQ ID NO: 1749 - DNA, 618 bp, synthetic construct
  source 1..618: mol_type = other DNA; note = HA-NLS-RNF125-(GS)4-TCF4 nucleic acid
atgtacccatacgatgttccagattacgctccggcggcgaaacgcgtgaaactggatggcagcggcagcggcagcggctccgtgctgagcaccgacagcggcaaatcggcgcccgcctctgccaccgcgcgggccctggagcgcaggagggacccggagttgcccgtcacgtccttcgactgcgccgtgtgccttgaggtgttacaccagcctgtccggacccgctgcggccacgtattctgccgttcctgtattgctaccagtctgaagaacaacaagtggacctgtccttattgccgggcatatcttccttcagaaggagttccagcaactgatgtagccaaaagaatgaaatcagagtataagaactgcgctgagtgtgacaccctggtttgcctcagtgaaatgagggcacatattcggacttgtcagaagtacatagataagtatggaccaggcagcggcagcggcagcggcagcgatgacctaggcgccaacgacgaactgatttccttcaaagacgagggcgaacaggaggagaagagctccgaaaactcctcggcagagagggatttagctgatgtcaaatcgtctctagtcaatgaatcagaaacgtaa

SEQ ID NO: 1750 - DNA, 624 bp, synthetic construct
  source 1..624: mol_type = other DNA; note = HA-NLS-RNF125-(GS)5-TCF4 nucleic acid
atgtacccatacgatgttccagattacgctccggcggcgaaacgcgtgaaactggatggcagcggcagcggcagcggctccgtgctgagcaccgacagcggcaaatcggcgcccgcctctgccaccgcgcgggccctggagcgcaggagggacccggagttgcccgtcacgtccttcgactgcgccgtgtgccttgaggtgttacaccagcctgtccggacccgctgcggccacgtattctgccgttcctgtattgctaccagtctgaagaacaacaagtggacctgtccttattgccgggcatatcttccttcagaaggagttccagcaactgatgtagccaaaagaatgaaatcagagtataagaactgcgctgagtgtgacaccctggtttgcctcagtgaaatgagggcacatattcggacttgtcagaagtacatagataagtatggaccaggcagcggcagcggcagcggcagcggcagcgatgacctaggcgccaacgacgaactgatttccttcaaagacgagggcgaacaggaggagaagagctccgaaaactcctcggcagagagggatttagctgatgtcaaatcgtctctagtcaatgaatcagaaacgtaa

SEQ ID NO: 1751 - DNA, 630 bp, synthetic construct
  source 1..630: mol_type = other DNA; note = HA-NLS-RNF125-(GS)6-TCF4 nucleic acid
atgtacccatacgatgttccagattacgctccggcggcgaaacgcgtgaaactggatggcagcggcagcggcagcggctccgtgctgagcaccgacagcggcaaatcggcgcccgcctctgccaccgcgcgggccctggagcgcaggagggacccggagttgcccgtcacgtccttcgactgcgccgtgtgccttgaggtgttacaccagcctgtccggacccgctgcggccacgtattctgccgttcctgtattgctaccagtctgaagaacaacaagtggacctgtccttattgccgggcatatcttccttcagaaggagttccagcaactgatgtagccaaaagaatgaaatcagagtataagaactgcgctgagtgtgacaccctggtttgcctcagtgaaatgagggcacatattcggacttgtcagaagtacatagataagtatggaccaggcagcggcagcggcagcggcagcggcagcggcagcgatgacctaggcgccaacgacgaactgatttccttcaaagacgagggcgaacaggaggagaagagctccgaaaactcctcggcagagagggatttagctgatgtcaaatcgtctctagtcaatgaatcagaaacgtaa

SEQ ID NO: 1752 - DNA, 867 bp, synthetic construct
  source 1..867: mol_type = other DNA; note = TCF4-(GS)1-SPOP-NLS nucleic acid
atggatgacctaggcgccaacgacgaactgatttccttcaaagacgagggcgaacaggaggagaagagctccgaaaactcctcggcagagagggatttagctgatgtcaaatcgtctctagtcaatgaatcagaaacgggcagcaacgggcttctccctgatgacaagcttaccctcttctgcgaggtgagtgttgtgcaagattctgtcaacatttctggccagaataccatgaacatggtaaaggttcctgagtgccggctggcagatgagttaggaggactgtgggagaattcccggttcacagactgctgcttgtgtgttgccggccaggaattccaggctcacaaggctatcttagcagctcgttctccggtttttagtgccatgtttgaacatgaaatggaggagagcaaaaagaatcgagttgaaatcaatgatgtggagcctgaagtttttaaggaaatgatgtgcttcatttacacggggaaggctccaaacctcgacaaaatggctgatgatttgctggcagctgctgacaagtatgccctggagcgcttaaaggtcatgtgtgaggatgccctctgcagtaacctgtccgtggagaacgctgcagaaattctcatcctggccgacctccacagtgcagatcagttgaaaactcaggcagtggatttcatcaactatcatgcttcggatgtcttggagacctctgggtggaagtcaatggtggtgtcacatccccacttggtggctgaggcataccgctctctggcttcagcacagtgcccttttctgggacccccacgcaaacgcctgaagcaatccggcagcggcagcccggcggcgaaacgcgtgaaactggat

SEQ ID NO: 1753 - DNA, 873 bp, synthetic construct
  source 1..873: mol_type = other DNA; note = TCF4-(GS)2-SPOP-NLS nucleic acid
atggatgacctaggcgccaacgacgaactgatttccttcaaagacgagggcgaacaggaggagaagagctccgaaaactcctcggcagagagggatttagctgatgtcaaatcgtctctagtcaatgaatcagaaacgggcagcggcagcaacgggcttctccctgatgacaagcttaccctcttctgcgaggtgagtgttgtgcaagattctgtcaacatttctggccagaataccatgaacatggtaaaggttcctgagtgccggctggcagatgagttaggaggactgtgggagaattcccggttcacagactgctgcttgtgtgttgccggccaggaattccaggctcacaaggctatcttagcagctcgttctccggtttttagtgccatgtttgaacatgaaatggaggagagcaaaaagaatcgagttgaaatcaatgatgtggagcctgaagtttttaaggaaatgatgtgcttcatttacacggggaaggctccaaacctcgacaaaatggctgatgatttgctggcagctgctgacaagtatgccctggagcgcttaaaggtcatgtgtgaggatgccctctgcagtaacctgtccgtggagaacgctgcagaaattctcatcctggccgacctccacagtgcagatcagttgaaaactcaggcagtggatttcatcaactatcatgcttcggatgtcttggagacctctgggtggaagtcaatggtggtgtcacatccccacttggtggctgaggcataccgctctctggcttcagcacagtgcccttttctgggacccccacgcaaacgcctgaagcaatccggcagcggcagcccggcggcgaaacgcgtgaaactggat

SEQ ID NO: 1754 - DNA, 879 bp, synthetic construct
  source 1..879: mol_type = other DNA; note = TCF4-(GS)3-SPOP-NLS nucleic acid
atggatgacctaggcgccaacgacgaactgatttccttcaaagacgagggcgaacaggaggagaagagctccgaaaactcctcggcagagagggatttagctgatgtcaaatcgtctctagtcaatgaatcagaaacgggcagcggcagcggcagcaacgggcttctccctgatgacaagcttaccctcttctgcgaggtgagtgttgtgcaagattctgtcaacatttctggccagaataccatgaacatggtaaaggttcctgagtgccggctggcagatgagttaggaggactgtgggagaattcccggttcacagactgctgcttgtgtgttgccggccaggaattccaggctcacaaggctatcttagcagctcgttctccggtttttagtgccatgtttgaacatgaaatggaggagagcaaaaagaatcgagttgaaatcaatgatgtggagcctgaagtttttaaggaaatgatgtgcttcatttacacggggaaggctccaaacctcgacaaaatggctgatgatttgctggcagctgctgacaagtatgccctggagcgcttaaaggtcatgtgtgaggatgccctctgcagtaacctgtccgtggagaacgctgcagaaattctcatcctggccgacctccacagtgcagatcagttgaaaactcaggcagtggatttcatcaactatcatgcttcggatgtcttggagacctctgggtggaagtcaatggtggtgtcacatccccacttggtggctgaggcataccgctctctggcttcagcacagtgcccttttctgggacccccacgcaaacgcctgaagcaatccggcagcggcagcccggcggcgaaacgcgtgaaactggat

SEQ ID NO: 1755 - DNA, 885 bp, synthetic construct
  source 1..885: mol_type = other DNA; note = TCF4-(GS)4-SPOP-NLS nucleic acid
atggatgacctaggcgccaacgacgaactgatttccttcaaagacgagggcgaacaggaggagaagagctccgaaaactcctcggcagagagggatttagctgatgtcaaatcgtctctagtcaatgaatcagaaacgggcagcggcagcggcagcggcagcaacgggcttctccctgatgacaagcttaccctcttctgcgaggtgagtgttgtgcaagattctgtcaacatttctggccagaataccatgaacatggtaaaggttcctgagtgccggctggcagatgagttaggaggactgtgggagaattcccggttcacagactgctgcttgtgtgttgccggccaggaattccaggctcacaaggctatcttagcagctcgttctccggtttttagtgccatgtttgaacatgaaatggaggagagcaaaaagaatcgagttgaaatcaatgatgtggagcctgaagtttttaaggaaatgatgtgcttcatttacacggggaaggctccaaacctcgacaaaatggctgatgatttgctggcagctgctgacaagtatgccctggagcgcttaaaggtcatgtgtgaggatgccctctgcagtaacctgtccgtggagaacgctgcagaaattctcatcctggccgacctccacagtgcagatcagttgaaaactcaggcagtggatttcatcaactatcatgcttcggatgtcttggagacctctgggtggaagtcaatggtggtgtcacatccccacttggtggctgaggcataccgctctctggcttcagcacagtgcccttttctgggacccccacgcaaacgcctgaagcaatccggcagcggcagcccggcggcgaaacgcgtgaaactggat

SEQ ID NO: 1756 - DNA, 891 bp, synthetic construct
  source 1..891: mol_type = other DNA; note = TCF4-(GS)5-SPOP-NLS nucleic acid
atggatgacctaggcgccaacgacgaactgatttccttcaaagacgagggcgaacaggaggagaagagctccgaaaactcctcggcagagagggatttagctgatgtcaaatcgtctctagtcaatgaatcagaaacgggcagcggcagcggcagcggcagcggcagcaacgggcttctccctgatgacaagcttaccctcttctgcgaggtgagtgttgtgcaagattctgtcaacatttctggccagaataccatgaacatggtaaaggttcctgagtgccggctggcagatgagttaggaggactgtgggagaattcccggttcacagactgctgcttgtgtgttgccggccaggaattccaggctcacaaggctatcttagcagctcgttctccggtttttagtgccatgtttgaacatgaaatggaggagagcaaaaagaatcgagttgaaatcaatgatgtggagcctgaagtttttaaggaaatgatgtgcttcatttacacggggaaggctccaaacctcgacaaaatggctgatgatttgctggcagctgctgacaagtatgccctggagcgcttaaaggtcatgtgtgaggatgccctctgcagtaacctgtccgtggagaacgctgcagaaattctcatcctggccgacctccacagtgcagatcagttgaaaactcaggcagtggatttcatcaactatcatgcttcggatgtcttggagacctctgggtggaagtcaatggtggtgtcacatccccacttggtggctgaggcataccgctctctggcttcagcacagtgcccttttctgggacccccacgcaaacgcctgaagcaatccggcagcggcagcccggcggcgaaacgcgtgaaactggat

SEQ ID NO: 1757 - DNA, 897 bp, synthetic construct
  source 1..897: mol_type = other DNA; note = TCF4-(GS)6-SPOP-NLS nucleic acid
atggatgacctaggcgccaacgacgaactgatttccttcaaagacgagggcgaacaggaggagaagagctccgaaaactcctcggcagagagggatttagctgatgtcaaatcgtctctagtcaatgaatcagaaacgggcagcggcagcggcagcggcagcggcagcggcagcaacgggcttctccctgatgacaagcttaccctcttctgcgaggtgagtgttgtgcaagattctgtcaacatttctggccagaataccatgaacatggtaaaggttcctgagtgccggctggcagatgagttaggaggactgtgggagaattcccggttcacagactgctgcttgtgtgttgccggccaggaattccaggctcacaaggctatcttagcagctcgttctccggtttttagtgccatgtttgaacatgaaatggaggagagcaaaaagaatcgagttgaaatcaatgatgtggagcctgaagtttttaaggaaatgatgtgcttcatttacacggggaaggctccaaacctcgacaaaatggctgatgatttgctggcagctgctgacaagtatgccctggagcgcttaaaggtcatgtgtgaggatgccctctgcagtaacctgtccgtggagaacgctgcagaaattctcatcctggccgacctccacagtgcagatcagttgaaaactcaggcagtggatttcatcaactatcatgcttcggatgtcttggagacctctgggtggaagtcaatggtggtgtcacatccccacttggtggctgaggcataccgctctctggcttcagcacagtgcccttttctgggacccccacgcaaacgcctgaagcaatccggcagcggcagcccggcggcgaaacgcgtgaaactggat

SEQ ID NO: 1758 - DNA, 897 bp, synthetic construct
  source 1..897: mol_type = other DNA; note = TCF4-(GS)1-SPOP-NLS-HA nucleic acid
atggatgacctaggcgccaacgacgaactgatttccttcaaagacgagggcgaacaggaggagaagagctccgaaaactcctcggcagagagggatttagctgatgtcaaatcgtctctagtcaatgaatcagaaacgggcagcaacgggcttctccctgatgacaagcttaccctcttctgcgaggtgagtgttgtgcaagattctgtcaacatttctggccagaataccatgaacatggtaaaggttcctgagtgccggctggcagatgagttaggaggactgtgggagaattcccggttcacagactgctgcttgtgtgttgccggccaggaattccaggctcacaaggctatcttagcagctcgttctccggtttttagtgccatgtttgaacatgaaatggaggagagcaaaaagaatcgagttgaaatcaatgatgtggagcctgaagtttttaaggaaatgatgtgcttcatttacacggggaaggctccaaacctcgacaaaatggctgatgatttgctggcagctgctgacaagtatgccctggagcgcttaaaggtcatgtgtgaggatgccctctgcagtaacctgtccgtggagaacgctgcagaaattctcatcctggccgacctccacagtgcagatcagttgaaaactcaggcagtggatttcatcaactatcatgcttcggatgtcttggagacctctgggtggaagtcaatggtggtgtcacatccccacttggtggctgaggcataccgctctctggcttcagcacagtgcccttttctgggacccccacgcaaacgcctgaagcaatccggcagcggcagcccggcggcgaaacgcgtgaaactggattacccatacgatgttccagattacgcttaa

SEQ ID NO: 1759 - DNA, 903 bp, synthetic construct
  source 1..903: mol_type = other DNA; note = TCF4-(GS)2-SPOP-NLS-HA nucleic acid
atggatgacctaggcgccaacgacgaactgatttccttcaaagacgagggcgaacaggaggagaagagctccgaaaactcctcggcagagagggatttagctgatgtcaaatcgtctctagtcaatgaatcagaaacgggcagcggcagcaacgggcttctccctgatgacaagcttaccctcttctgcgaggtgagtgttgtgcaagattctgtcaacatttctggccagaataccatgaacatggtaaaggttcctgagtgccggctggcagatgagttaggaggactgtgggagaattcccggttcacagactgctgcttgtgtgttgccggccaggaattccaggctcacaaggctatcttagcagctcgttctccggtttttagtgccatgtttgaacatgaaatggaggagagcaaaaagaatcgagttgaaatcaatgatgtggagcctgaagtttttaaggaaatgatgtgcttcatttacacggggaaggctccaaacctcgacaaaatggctgatgatttgctggcagctgctgacaagtatgccctggagcgcttaaaggtcatgtgtgaggatgccctctgcagtaacctgtccgtggagaacgctgcagaaattctcatcctggccgacctccacagtgcagatcagttgaaaactcaggcagtggatttcatcaactatcatgcttcggatgtcttggagacctctgggtggaagtcaatggtggtgtcacatccccacttggtggctgaggcataccgctctctggcttcagcacagtgcccttttctgggacccccacgcaaacgcctgaagcaatccggcagcggcagcccggcggcgaaacgcgtgaaactggattacccatacgatgttccagattacgcttaa

SEQ ID NO: 1760 - DNA, 909 bp, synthetic construct
  source 1..909: mol_type = other DNA; note = TCF4-(GS)3-SPOP-NLS-HA nucleic acid
atggatgacctaggcgccaacgacgaactgatttccttcaaagacgagggcgaacaggaggagaagagctccgaaaactcctcggcagagagggatttagctgatgtcaaatcgtctctagtcaatgaatcagaaacgggcagcggcagcggcagcaacgggcttctccctgatgacaagcttaccctcttctgcgaggtgagtgttgtgcaagattctgtcaacatttctggccagaataccatgaacatggtaaaggttcctgagtgccggctggcagatgagttaggaggactgtgggagaattcccggttcacagactgctgcttgtgtgttgccggccaggaattccaggctcacaaggctatcttagcagctcgttctccggtttttagtgccatgtttgaacatgaaatggaggagagcaaaaagaatcgagttgaaatcaatgatgtggagcctgaagtttttaaggaaatgatgtgcttcatttacacggggaaggctccaaacctcgacaaaatggctgatgatttgctggcagctgctgacaagtatgccctggagcgcttaaaggtcatgtgtgaggatgccctctgcagtaacctgtccgtggagaacgctgcagaaattctcatcctggccgacctccacagtgcagatcagttgaaaactcaggcagtggatttcatcaactatcatgcttcggatgtcttggagacctctgggtggaagtcaatggtggtgtcacatccccacttggtggctgaggcataccgctctctggcttcagcacagtgcccttttctgggacccccacgcaaacgcctgaagcaatccggcagcggcagcccggcggcgaaacgcgtgaaactggattacccatacgatgttccagattacgcttaa

SEQ ID NO: 1761 - DNA, 915 bp, synthetic construct
  source 1..915: mol_type = other DNA; note = TCF4-(GS)4-SPOP-NLS-HA nucleic acid
atggatgacctaggcgccaacgacgaactgatttccttcaaagacgagggcgaacaggaggagaagagctccgaaaactcctcggcagagagggatttagctgatgtcaaatcgtctctagtcaatgaatcagaaacgggcagcggcagcggcagcggcagcaacgggcttctccctgatgacaagcttaccctcttctgcgaggtgagtgttgtgcaagattctgtcaacatttctggccagaataccatgaacatggtaaaggttcctgagtgccggctggcagatgagttaggaggactgtgggagaattcccggttcacagactgctgcttgtgtgttgccggccaggaattccaggctcacaaggctatcttagcagctcgttctccggtttttagtgccatgtttgaacatgaaatggaggagagcaaaaagaatcgagttgaaatcaatgatgtggagcctgaagtttttaaggaaatgatgtgcttcatttacacggggaaggctccaaacctcgacaaaatggctgatgatttgctggcagctgctgacaagtatgccctggagcgcttaaaggtcatgtgtgaggatgccctctgcagtaacctgtccgtggagaacgctgcagaaattctcatcctggccgacctccacagtgcagatcagttgaaaactcaggcagtggatttcatcaactatcatgcttcggatgtcttggagacctctgggtggaagtcaatggtggtgtcacatccccacttggtggctgaggcataccgctctctggcttcagcacagtgcccttttctgggacccccacgcaaacgcctgaagcaatccggcagcggcagcccggcggcgaaacgcgtgaaactggattacccatacgatgttccagattacgcttaa

SEQ ID NO: 1762 - DNA, 921 bp, synthetic construct
  source 1..921: mol_type = other DNA; note = TCF4-(GS)5-SPOP-NLS-HA nucleic acid
atggatgacctaggcgccaacgacgaactgatttccttcaaagacgagggcgaacaggaggagaagagctccgaaaactcctcggcagagagggatttagctgatgtcaaatcgtctctagtcaatgaatcagaaacgggcagcggcagcggcagcggcagcggcagcaacgggcttctccctgatgacaagcttaccctcttctgcgaggtgagtgttgtgcaagattctgtcaacatttctggccagaataccatgaacatggtaaaggttcctgagtgccggctggcagatgagttaggaggactgtgggagaattcccggttcacagactgctgcttgtgtgttgccggccaggaattccaggctcacaaggctatcttagcagctcgttctccggtttttagtgccatgtttgaacatgaaatggaggagagcaaaaagaatcgagttgaaatcaatgatgtggagcctgaagtttttaaggaaatgatgtgcttcatttacacggggaaggctccaaacctcgacaaaatggctgatgatttgctggcagctgctgacaagtatgccctggagcgcttaaaggtcatgtgtgaggatgccctctgcagtaacctgtccgtggagaacgctgcagaaattctcatcctggccgacctccacagtgcagatcagttgaaaactcaggcagtggatttcatcaactatcatgcttcggatgtcttggagacctctgggtggaagtcaatggtggtgtcacatccccacttggtggctgaggcataccgctctctggcttcagcacagtgcccttttctgggacccccacgcaaacgcctgaagcaatccggcagcggcagcccggcggcgaaacgcgtgaaactggattacccatacgatgttccagattacgcttaa

SEQ ID NO: 1763 - DNA, 927 bp, synthetic construct
  source 1..927: mol_type = other DNA; note = TCF4-(GS)6-SPOP-NLS-HA nucleic acid
atggatgacctaggcgccaacgacgaactgatttccttcaaagacgagggcgaacaggaggagaagagctccgaaaactcctcggcagagagggatttagctgatgtcaaatcgtctctagtcaatgaatcagaaacgggcagcggcagcggcagcggcagcggcagcggcagcaacgggcttctccctgatgacaagcttaccctcttctgcgaggtgagtgttgtgcaagattctgtcaacatttctggccagaataccatgaacatggtaaaggttcctgagtgccggctggcagatgagttaggaggactgtgggagaattcccggttcacagactgctgcttgtgtgttgccggccaggaattccaggctcacaaggctatcttagcagctcgttctccggtttttagtgccatgtttgaacatgaaatggaggagagcaaaaagaatcgagttgaaatcaatgatgtggagcctgaagtttttaaggaaatgatgtgcttcatttacacggggaaggctccaaacctcgacaaaatggctgatgatttgctggcagctgctgacaagtatgccctggagcgcttaaaggtcatgtgtgaggatgccctctgcagtaacctgtccgtggagaacgctgcagaaattctcatcctggccgacctccacagtgcagatcagttgaaaactcaggcagtggatttcatcaactatcatgcttcggatgtcttggagacctctgggtggaagtcaatggtggtgtcacatccccacttggtggctgaggcataccgctctctggcttcagcacagtgcccttttctgggacccccacgcaaacgcctgaagcaatccggcagcggcagcccggcggcgaaacgcgtgaaactggattacccatacgatgttccagattacgcttaa

SEQ ID NO: 1764 - DNA, 684 bp, synthetic construct
  source 1..684: mol_type = other DNA; note = TCF4-(GS)1-CHIP nucleic acid
atggatgacctaggcgccaacgacgaactgatttccttcaaagacgagggcgaacaggaggagaagagctccgaaaactcctcggcagagagggatttagctgatgtcaaatcgtctctagtcaatgaatcagaaacgggcagccggctgaacttcggggacgacatccccagcgctcttcgaatcgcgaagaagaagcgctggaacagcattgaggagcggcgcatccaccaggagagcgagctgcactcctacctctccaggctcattgccgcggagcgtgagagggagctggaagagtgccagcgaaaccacgagggtgatgaggacgacagccacgtccgggcccagcaggcctgcattgaggccaagcacgacaagtacatggcggacatggacgagcttttttctcaggtggatgagaagaggaagaagcgagacatccccgactacctgtgtggcaagatcagctttgagctgatgcgggagccgtgcatcacgcccagtggcatcacctacgaccgcaaggacatcgaggagcacctgcagcgtgtgggtcattttgacccggtgaccaggagccccctgacccaggaacagctcatccccaacttggctatgaaggaggttattgacgcattcatctctgagaatggctgggtggaggactacggcagcggcagc

SEQ ID NO: 1765 - DNA, 690 bp, synthetic construct
  source 1..690: mol_type = other DNA; note = TCF4-(GS)2-CHIP nucleic acid
atggatgacctaggcgccaacgacgaactgatttccttcaaagacgagggcgaacaggaggagaagagctccgaaaactcctcggcagagagggatttagctgatgtcaaatcgtctctagtcaatgaatcagaaacgggcagcggcagccggctgaacttcggggacgacatccccagcgctcttcgaatcgcgaagaagaagcgctggaacagcattgaggagcggcgcatccaccaggagagcgagctgcactcctacctctccaggctcattgccgcggagcgtgagagggagctggaagagtgccagcgaaaccacgagggtgatgaggacgacagccacgtccgggcccagcaggcctgcattgaggccaagcacgacaagtacatggcggacatggacgagcttttttctcaggtggatgagaagaggaagaagcgagacatccccgactacctgtgtggcaagatcagctttgagctgatgcgggagccgtgcatcacgcccagtggcatcacctacgaccgcaaggacatcgaggagcacctgcagcgtgtgggtcattttgacccggtgaccaggagccccctgacccaggaacagctcatccccaacttggctatgaaggaggttattgacgcattcatctctgagaatggctgggtggaggactacggcagcggcagc

SEQ ID NO: 1766 - DNA, 696 bp, synthetic construct
  source 1..696: mol_type = other DNA; note = TCF4-(GS)3-CHIP nucleic acid
atggatgacctaggcgccaacgacgaactgatttccttcaaagacgagggcgaacaggaggagaagagctccgaaaactcctcggcagagagggatttagctgatgtcaaatcgtctctagtcaatgaatcagaaacgggcagcggcagcggcagccggctgaacttcggggacgacatccccagcgctcttcgaatcgcgaagaagaagcgctggaacagcattgaggagcggcgcatccaccaggagagcgagctgcactcctacctctccaggctcattgccgcggagcgtgagagggagctggaagagtgccagcgaaaccacgagggtgatgaggacgacagccacgtccgggcccagcaggcctgcattgaggccaagcacgacaagtacatggcggacatggacgagcttttttctcaggtggatgagaagaggaagaagcgagacatccccgactacctgtgtggcaagatcagctttgagctgatgcgggagccgtgcatcacgcccagtggcatcacctacgaccgcaaggacatcgaggagcacctgcagcgtgtgggtcattttgacccggtgaccaggagccccctgacccaggaacagctcatccccaacttggctatgaaggaggttattgacgcattcatctctgagaatggctgggtggaggactacggcagcggcagc

SEQ ID NO: 1767 - DNA, 702 bp, synthetic construct
  source 1..702: mol_type = other DNA; note = TCF4-(GS)4-CHIP nucleic acid
atggatgacctaggcgccaacgacgaactgatttccttcaaagacgagggcgaacaggaggagaagagctccgaaaactcctcggcagagagggatttagctgatgtcaaatcgtctctagtcaatgaatcagaaacgggcagcggcagcggcagcggcagccggctgaacttcggggacgacatccccagcgctcttcgaatcgcgaagaagaagcgctggaacagcattgaggagcggcgcatccaccaggagagcgagctgcactcctacctctccaggctcattgccgcggagcgtgagagggagctggaagagtgccagcgaaaccacgagggtgatgaggacgacagccacgtccgggcccagcaggcctgcattgaggccaagcacgacaagtacatggcggacatggacgagcttttttctcaggtggatgagaagaggaagaagcgagacatccccgactacctgtgtggcaagatcagctttgagctgatgcgggagccgtgcatcacgcccagtggcatcacctacgaccgcaaggacatcgaggagcacctgcagcgtgtgggtcattttgacccggtgaccaggagccccctgacccaggaacagctcatccccaacttggctatgaaggaggttattgacgcattcatctctgagaatggctgggtggaggactacggcagcggcagc

SEQ ID NO: 1768 - DNA, 708 bp, synthetic construct
  source 1..708: mol_type = other DNA; note = TCF4-(GS)5-CHIP nucleic acid
atggatgacctaggcgccaacgacgaactgatttccttcaaagacgagggcgaacaggaggagaagagctccgaaaactcctcggcagagagggatttagctgatgtcaaatcgtctctagtcaatgaatcagaaacgggcagcggcagcggcagcggcagcggcagccggctgaacttcggggacgacatccccagcgctcttcgaatcgcgaagaagaagcgctggaacagcattgaggagcggcgcatccaccaggagagcgagctgcactcctacctctccaggctcattgccgcggagcgtgagagggagctggaagagtgccagcgaaaccacgagggtgatgaggacgacagccacgtccgggcccagcaggcctgcattgaggccaagcacgacaagtacatggcggacatggacgagcttttttctcaggtggatgagaagaggaagaagcgagacatccccgactacctgtgtggcaagatcagctttgagctgatgcgggagccgtgcatcacgcccagtggcatcacctacgaccgcaaggacatcgaggagcacctgcagcgtgtgggtcattttgacccggtgaccaggagccccctgacccaggaacagctcatccccaacttggctatgaaggaggttattgacgcattcatctctgagaatggctgggtggaggactacggcagcggcagc

SEQ ID NO: 1769 - DNA, 714 bp, synthetic construct
  source 1..714: mol_type = other DNA; note = TCF4-(GS)6-CHIP nucleic acid
atggatgacctaggcgccaacgacgaactgatttccttcaaagacgagggcgaacaggaggagaagagctccgaaaactcctcggcagagagggatttagctgatgtcaaatcgtctctagtcaatgaatcagaaacgggcagcggcagcggcagcggcagcggcagcggcagccggctgaacttcggggacgacatccccagcgctcttcgaatcgcgaagaagaagcgctggaacagcattgaggagcggcgcatccaccaggagagcgagctgcactcctacctctccaggctcattgccgcggagcgtgagagggagctggaagagtgccagcgaaaccacgagggtgatgaggacgacagccacgtccgggcccagcaggcctgcattgaggccaagcacgacaagtacatggcggacatggacgagcttttttctcaggtggatgagaagaggaagaagcgagacatccccgactacctgtgtggcaagatcagctttgagctgatgcgggagccgtgcatcacgcccagtggcatcacctacgaccgcaaggacatcgaggagcacctgcagcgtgtgggtcattttgacccggtgaccaggagccccctgacccaggaacagctcatccccaacttggctatgaaggaggttattgacgcattcatctctgagaatggctgggtggaggactacggcagcggcagc

SEQ ID NO: 1770 - DNA, 714 bp, synthetic construct
  source 1..714: mol_type = other DNA; note = TCF4-(GS)1-CHIP-HA nucleic acid
atggatgacctaggcgccaacgacgaactgatttccttcaaagacgagggcgaacaggaggagaagagctccgaaaactcctcggcagagagggatttagctgatgtcaaatcgtctctagtcaatgaatcagaaacgggcagccggctgaacttcggggacgacatccccagcgctcttcgaatcgcgaagaagaagcgctggaacagcattgaggagcggcgcatccaccaggagagcgagctgcactcctacctctccaggctcattgccgcggagcgtgagagggagctggaagagtgccagcgaaaccacgagggtgatgaggacgacagccacgtccgggcccagcaggcctgcattgaggccaagcacgacaagtacatggcggacatggacgagcttttttctcaggtggatgagaagaggaagaagcgagacatccccgactacctgtgtggcaagatcagctttgagctgatgcgggagccgtgcatcacgcccagtggcatcacctacgaccgcaaggacatcgaggagcacctgcagcgtgtgggtcattttgacccggtgaccaggagccccctgacccaggaacagctcatccccaacttggctatgaaggaggttattgacgcattcatctctgagaatggctgggtggaggactacggcagcggcagctacccatacgatgttccagattacgcttaa

SEQ ID NO: 1771 - DNA, 720 bp, synthetic construct
  source 1..720: mol_type = other DNA; note = TCF4-(GS)2-CHIP-HA nucleic acid
atggatgacctaggcgccaacgacgaactgatttccttcaaagacgagggcgaacaggaggagaagagctccgaaaactcctcggcagagagggatttagctgatgtcaaatcgtctctagtcaatgaatcagaaacgggcagcggcagccggctgaacttcggggacgacatccccagcgctcttcgaatcgcgaagaagaagcgctggaacagcattgaggagcggcgcatccaccaggagagcgagctgcactcctacctctccaggctcattgccgcggagcgtgagagggagctggaagagtgccagcgaaaccacgagggtgatgaggacgacagccacgtccgggcccagcaggcctgcattgaggccaagcacgacaagtacatggcggacatggacgagcttttttctcaggtggatgagaagaggaagaagcgagacatccccgactacctgtgtggcaagatcagctttgagctgatgcgggagccgtgcatcacgcccagtggcatcacctacgaccgcaaggacatcgaggagcacctgcagcgtgtgggtcattttgacccggtgaccaggagccccctgacccaggaacagctcatccccaacttggctatgaaggaggttattgacgcattcatctctgagaatggctgggtggaggactacggcagcggcagctacccatacgatgttccagattacgcttaa

SEQ ID NO: 1772 - DNA, 726 bp, synthetic construct
  source 1..726: mol_type = other DNA; note = TCF4-(GS)3-CHIP-HA nucleic acid
atggatgacctaggcgccaacgacgaactgatttccttcaaagacgagggcgaacaggaggagaagagctccgaaaactcctcggcagagagggatttagctgatgtcaaatcgtctctagtcaatgaatcagaaacgggcagcggcagcggcagccggctgaacttcggggacgacatccccagcgctcttcgaatcgcgaagaagaagcgctggaacagcattgaggagcggcgcatccaccaggagagcgagctgcactcctacctctccaggctcattgccgcggagcgtgagagggagctggaagagtgccagcgaaaccacgagggtgatgaggacgacagccacgtccgggcccagcaggcctgcattgaggccaagcacgacaagtacatggcggacatggacgagcttttttctcaggtggatgagaagaggaagaagcgagacatccccgactacctgtgtggcaagatcagctttgagctgatgcgggagccgtgcatcacgcccagtggcatcacctacgaccgcaaggacatcgaggagcacctgcagcgtgtgggtcattttgacccggtgaccaggagccccctgacccaggaacagctcatccccaacttggctatgaaggaggttattgacgcattcatctctgagaatggctgggtggaggactacggcagcggcagctacccatacgatgttccagattacgcttaa

SEQ ID NO: 1773 - DNA, 732 bp, synthetic construct
  source 1..732: mol_type = other DNA; note = TCF4-(GS)4-CHIP-HA nucleic acid
atggatgacctaggcgccaacgacgaactgatttccttcaaagacgagggcgaacaggaggagaagagctccgaaaactcctcggcagagagggatttagctgatgtcaaatcgtctctagtcaatgaatcagaaacgggcagcggcagcggcagcggcagccggctgaacttcggggacgacatccccagcgctcttcgaatcgcgaagaagaagcgctggaacagcattgaggagcggcgcatccaccaggagagcgagctgcactcctacctctccaggctcattgccgcggagcgtgagagggagctggaagagtgccagcgaaaccacgagggtgatgaggacgacagccacgtccgggcccagcaggcctgcattgaggccaagcacgacaagtacatggcggacatggacgagcttttttctcaggtggatgagaagaggaagaagcgagacatccccgactacctgtgtggcaagatcagctttgagctgatgcgggagccgtgcatcacgcccagtggcatcacctacgaccgcaaggacatcgaggagcacctgcagcgtgtgggtcattttgacccggtgaccaggagccccctgacccaggaacagctcatccccaacttggctatgaaggaggttattgacgcattcatctctgagaatggctgggtggaggactacggcagcggcagctacccatacgatgttccagattacgcttaa

SEQ ID NO: 1774 - DNA, 738 bp, synthetic construct
  source 1..738: mol_type = other DNA; note = TCF4-(GS)5-CHIP-HA nucleic acid
atggatgacctaggcgccaacgacgaactgatttccttcaaagacgagggcgaacaggaggagaagagctccgaaaactcctcggcagagagggatttagctgatgtcaaatcgtctctagtcaatgaatcagaaacgggcagcggcagcggcagcggcagcggcagccggctgaacttcggggacgacatccccagcgctcttcgaatcgcgaagaagaagcgctggaacagcattgaggagcggcgcatccaccaggagagcgagctgcactcctacctctccaggctcattgccgcggagcgtgagagggagctggaagagtgccagcgaaaccacgagggtgatgaggacgacagccacgtccgggcccagcaggcctgcattgaggccaagcacgacaagtacatggcggacatggacgagcttttttctcaggtggatgagaagaggaagaagcgagacatccccgactacctgtgtggcaagatcagctttgagctgatgcgggagccgtgcatcacgcccagtggcatcacctacgaccgcaaggacatcgaggagcacctgcagcgtgtgggtcattttgacccggtgaccaggagccccctgacccaggaacagctcatccccaacttggctatgaaggaggttattgacgcattcatctctgagaatggctgggtggaggactacggcagcggcagctacccatacgatgttccagattacgcttaa

SEQ ID NO: 1775 - DNA, 744 bp, synthetic construct
  source 1..744: mol_type = other DNA; note = TCF4-(GS)6-CHIP-HA nucleic acid
atggatgacctaggcgccaacgacgaactgatttccttcaaagacgagggcgaacaggaggagaagagctccgaaaactcctcggcagagagggatttagctgatgtcaaatcgtctctagtcaatgaatcagaaacgggcagcggcagcggcagcggcagcggcagcggcagccggctgaacttcggggacgacatccccagcgctcttcgaatcgcgaagaagaagcgctggaacagcattgaggagcggcgcatccaccaggagagcgagctgcactcctacctctccaggctcattgccgcggagcgtgagagggagctggaagagtgccagcgaaaccacgagggtgatgaggacgacagccacgtccgggcccagcaggcctgcattgaggccaagcacgacaagtacatggcggacatggacgagcttttttctcaggtggatgagaagaggaagaagcgagacatccccgactacctgtgtggcaagatcagctttgagctgatgcgggagccgtgcatcacgcccagtggcatcacctacgaccgcaaggacatcgaggagcacctgcagcgtgtgggtcattttgacccggtgaccaggagccccctgacccaggaacagctcatccccaacttggctatgaaggaggttattgacgcattcatctctgagaatggctgggtggaggactacggcagcggcagctacccatacgatgttccagattacgcttaa

SEQ ID NO: 1776 - DNA, 249 bp, synthetic construct
  source 1..249: mol_type = other DNA; note = DCAF1-(GS)1-TCF4 nucleic acid
caggcgccgattaactttaccagccgcctgaaccgccgcgcgagctttccgaaatatggcggcgtggatggcggctgctttgatcgccatctgatttttagccgcggcagcgatgacctaggcgccaacgacgaactgatttccttcaaagacgagggcgaacaggaggagaagagctccgaaaactcctcggcagagagggatttagctgatgtcaaatcgtctctagtcaatgaatcagaaacgtaa

SEQ ID NO: 1777 - DNA, 255 bp, synthetic construct
  source 1..255: mol_type = other DNA; note = DCAF1-(GS)2-TCF4 nucleic acid
caggcgccgattaactttaccagccgcctgaaccgccgcgcgagctttccgaaatatggcggcgtggatggcggctgctttgatcgccatctgatttttagccgcggcagcggcagcgatgacctaggcgccaacgacgaactgatttccttcaaagacgagggcgaacaggaggagaagagctccgaaaactcctcggcagagagggatttagctgatgtcaaatcgtctctagtcaatgaatcagaaacgtaa

SEQ ID NO: 1778 - DNA, 261 bp, synthetic construct
  source 1..261: mol_type = other DNA; note = DCAF1-(GS)3-TCF4 nucleic acid
caggcgccgattaactttaccagccgcctgaaccgccgcgcgagctttccgaaatatggcggcgtggatggcggctgctttgatcgccatctgatttttagccgcggcagcggcagcggcagcgatgacctaggcgccaacgacgaactgatttccttcaaagacgagggcgaacaggaggagaagagctccgaaaactcctcggcagagagggatttagctgatgtcaaatcgtctctagtcaatgaatcagaaacgtaa

SEQ ID NO: 1779 - DNA, 267 bp, synthetic construct
  source 1..267: mol_type = other DNA; note = DCAF1-(GS)4-TCF4 nucleic acid
caggcgccgattaactttaccagccgcctgaaccgccgcgcgagctttccgaaatatggcggcgtggatggcggctgctttgatcgccatctgatttttagccgcggcagcggcagcggcagcggcagcgatgacctaggcgccaacgacgaactgatttccttcaaagacgagggcgaacaggaggagaagagctccgaaaactcctcggcagagagggatttagctgatgtcaaatcgtctctagtcaatgaatcagaaacgtaa

SEQ ID NO: 1780 - DNA, 273 bp, synthetic construct
  source 1..273: mol_type = other DNA; note = DCAF1-(GS)5-TCF4 nucleic acid
caggcgccgattaactttaccagccgcctgaaccgccgcgcgagctttccgaaatatggcggcgtggatggcggctgctttgatcgccatctgatttttagccgcggcagcggcagcggcagcggcagcggcagcgatgacctaggcgccaacgacgaactgatttccttcaaagacgagggcgaacaggaggagaagagctccgaaaactcctcggcagagagggatttagctgatgtcaaatcgtctctagtcaatgaatcagaaacgtaa

SEQ ID NO: 1781 - DNA, 279 bp, synthetic construct
  source 1..279: mol_type = other DNA; note = DCAF1-(GS)6-TCF4 nucleic acid
caggcgccgattaactttaccagccgcctgaaccgccgcgcgagctttccgaaatatggcggcgtggatggcggctgctttgatcgccatctgatttttagccgcggcagcggcagcggcagcggcagcggcagcggcagcgatgacctaggcgccaacgacgaactgatttccttcaaagacgagggcgaacaggaggagaagagctccgaaaactcctcggcagagagggatttagctgatgtcaaatcgtctctagtcaatgaatcagaaacgtaa

SEQ ID NO: 1782 - DNA, 297 bp, synthetic construct
  source 1..297: mol_type = other DNA; note = HA-DCAF1-(GS)1-TCF4 nucleic acid
atgtacccatacgatgttccagattacgctggcagcggcagcggcagccaggcgccgattaactttaccagccgcctgaaccgccgcgcgagctttccgaaatatggcggcgtggatggcggctgctttgatcgccatctgatttttagccgcggcagcgatgacctaggcgccaacgacgaactgatttccttcaaagacgagggcgaacaggaggagaagagctccgaaaactcctcggcagagagggatttagctgatgtcaaatcgtctctagtcaatgaatcagaaacgtaa

SEQ ID NO: 1783 - DNA, 303 bp, synthetic construct
  source 1..303: mol_type = other DNA; note = HA-DCAF1-(GS)2-TCF4 nucleic acid
atgtacccatacgatgttccagattacgctggcagcggcagcggcagccaggcgccgattaactttaccagccgcctgaaccgccgcgcgagctttccgaaatatggcggcgtggatggcggctgctttgatcgccatctgatttttagccgcggcagcggcagcgatgacctaggcgccaacgacgaactgatttccttcaaagacgagggcgaacaggaggagaagagctccgaaaactcctcggcagagagggatttagctgatgtcaaatcgtctctagtcaatgaatcagaaacgtaa

SEQ ID NO: 1784 - DNA, 309 bp, synthetic construct
  source 1..309: mol_type = other DNA; note = HA-DCAF1-(GS)3-TCF4 nucleic acid
atgtacccatacgatgttccagattacgctggcagcggcagcggcagccaggcgccgattaactttaccagccgcctgaaccgccgcgcgagctttccgaaatatggcggcgtggatggcggctgctttgatcgccatctgatttttagccgcggcagcggcagcggcagcgatgacctaggcgccaacgacgaactgatttccttcaaagacgagggcgaacaggaggagaagagctccgaaaactcctcggcagagagggatttagctgatgtcaaatcgtctctagtcaatgaatcagaaacgtaa

SEQ ID NO: 1785 - DNA, 315 bp, synthetic construct
  source 1..315: mol_type = other DNA; note = HA-DCAF1-(GS)4-TCF4 nucleic acid
atgtacccatacgatgttccagattacgctggcagcggcagcggcagccaggcgccgattaactttaccagccgcctgaaccgccgcgcgagctttccgaaatatggcggcgtggatggcggctgctttgatcgccatctgatttttagccgcggcagcggcagcggcagcggcagcgatgacctaggcgccaacgacgaactgatttccttcaaagacgagggcgaacaggaggagaagagctccgaaaactcctcggcagagagggatttagctgatgtcaaatcgtctctagtcaatgaatcagaaacgtaa

SEQ ID NO: 1786 - DNA, 321 bp, synthetic construct
  source 1..321: mol_type = other DNA; note = HA-DCAF1-(GS)5-TCF4 nucleic acid
atgtacccatacgatgttccagattacgctggcagcggcagcggcagccaggcgccgattaactttaccagccgcctgaaccgccgcgcgagctttccgaaatatggcggcgtggatggcggctgctttgatcgccatctgatttttagccgcggcagcggcagcggcagcggcagcggcagcgatgacctaggcgccaacgacgaactgatttccttcaaagacgagggcgaacaggaggagaagagctccgaaaactcctcggcagagagggatttagctgatgtcaaatcgtctctagtcaatgaatcagaaacgtaa

SEQ ID NO: 1787 - DNA, 327 bp, synthetic construct
  source 1..327: mol_type = other DNA; note = HA-DCAF1-(GS)6-TCF4 nucleic acid
atgtacccatacgatgttccagattacgctggcagcggcagcggcagccaggcgccgattaactttaccagccgcctgaaccgccgcgcgagctttccgaaatatggcggcgtggatggcggctgctttgatcgccatctgatttttagccgcggcagcggcagcggcagcggcagcggcagcggcagcgatgacctaggcgccaacgacgaactgatttccttcaaagacgagggcgaacaggaggagaagagctccgaaaactcctcggcagagagggatttagctgatgtcaaatcgtctctagtcaatgaatcagaaacgtaa

SEQ ID NO: 1788 - DNA, 1212 bp, synthetic construct
  source 1..1212: mol_type = other DNA; note = TCF4-(GS)1-E6AP nucleic acid
gatgacctaggcgccaacgacgaactgatttccttcaaagacgagggcgaacaggaggagaagagctccgaaaactcctcggcagagagggatttagctgatgtcaaatcgtctctagtcaatgaatcagaaacgggcagcaatccatatttgagactcaaagttagacgtgaccatatcatagatgatgcacttgtccggctagagatgatcgctatggaaaatcctgcagacttgaagaagcagttgtatgtggaatttgaaggagaacaaggagttgatgagggaggtgtttccaaagaattttttcagctggttgtggaggaaatcttcaatccagatattggtatgttcacatacgatgaatctacaaaattgttttggtttaatccatcttcttttgaaactgagggtcagtttactctgattggcatagtactgggtctggctatttacaataactgtatactggatgtacattttcccatggttgtctacaggaagctaatggggaaaaaaggaacttttcgtgacttgggagactctcacccagttctatatcagagtttaaaagatttattggagtatgaagggaatgtggaagatgacatgatgatcactttccagatatcacagacagatctttttggtaacccaatgatgtatgatctaaaggaaaatggtgataaaattccaattacaaatgaaaacaggaaggaatttgtcaatctttattctgactacattctcaataaatcagtagaaaaacagttcaaggcttttcggagaggttttcatatggtgaccaatgaatctcccttaaagtacttattcagaccagaagaaattgaattgcttatatgtggaagccggaatctagatttccaagcactagaagaaactacagaatatgacggtggctataccagggactctgttctgattagggagttctgggaaatcgttcattcatttacagatgaacagaaaagactcttcttgcagtttacaacgggcacagacagagcacctgtgggaggactaggaaaattaaagatgattatagccaaaaatggcccagacacagaaaggttacctacatctcatacttgctttaatgtgcttttacttccggaatactcaagcaaagaaaaacttaaagagagattgttgaaggccatcacgtatgccaaaggatttggcatgctgtaa

SEQ ID NO: 1789 - DNA, 1218 bp, synthetic construct
  source 1..1218: mol_type = other DNA; note = TCF4-(GS)2-E6AP nucleic acid
gatgacctaggcgccaacgacgaactgatttccttcaaagacgagggcgaacaggaggagaagagctccgaaaactcctcggcagagagggatttagctgatgtcaaatcgtctctagtcaatgaatcagaaacgggcagcggcagcaatccatatttgagactcaaagttagacgtgaccatatcatagatgatgcacttgtccggctagagatgatcgctatggaaaatcctgcagacttgaagaagcagttgtatgtggaatttgaaggagaacaaggagttgatgagggaggtgtttccaaagaattttttcagctggttgtggaggaaatcttcaatccagatattggtatgttcacatacgatgaatctacaaaattgttttggtttaatccatcttcttttgaaactgagggtcagtttactctgattggcatagtactgggtctggctatttacaataactgtatactggatgtacattttcccatggttgtctacaggaagctaatggggaaaaaaggaacttttcgtgacttgggagactctcacccagttctatatcagagtttaaaagatttattggagtatgaagggaatgtggaagatgacatgatgatcactttccagatatcacagacagatctttttggtaacccaatgatgtatgatctaaaggaaaatggtgataaaattccaattacaaatgaaaacaggaaggaatttgtcaatctttattctgactacattctcaataaatcagtagaaaaacagttcaaggcttttcggagaggttttcatatggtgaccaatgaatctcccttaaagtacttattcagaccagaagaaattgaattgcttatatgtggaagccggaatctagatttccaagcactagaagaaactacagaatatgacggtggctataccagggactctgttctgattagggagttctgggaaatcgttcattcatttacagatgaacagaaaagactcttcttgcagtttacaacgggcacagacagagcacctgtgggaggactaggaaaattaaagatgattatagccaaaaatggcccagacacagaaaggttacctacatctcatacttgctttaatgtgcttttacttccggaatactcaagcaaagaaaaacttaaagagagattgttgaaggccatcacgtatgccaaaggatttggcatgctgtaa

SEQ ID NO: 1790 - DNA, 1224 bp, synthetic construct
  source 1..1224: mol_type = other DNA; note = TCF4-(GS)3-E6AP nucleic acid
gatgacctaggcgccaacgacgaactgatttccttcaaagacgagggcgaacaggaggagaagagctccgaaaactcctcggcagagagggatttagctgatgtcaaatcgtctctagtcaatgaatcagaaacgggcagcggcagcggcagcaatccatatttgagactcaaagttagacgtgaccatatcatagatgatgcacttgtccggctagagatgatcgctatggaaaatcctgcagacttgaagaagcagttgtatgtggaatttgaaggagaacaaggagttgatgagggaggtgtttccaaagaattttttcagctggttgtggaggaaatcttcaatccagatattggtatgttcacatacgatgaatctacaaaattgttttggtttaatccatcttcttttgaaactgagggtcagtttactctgattggcatagtactgggtctggctatttacaataactgtatactggatgtacattttcccatggttgtctacaggaagctaatggggaaaaaaggaacttttcgtgacttgggagactctcacccagttctatatcagagtttaaaagatttattggagtatgaagggaatgtggaagatgacatgatgatcactttccagatatcacagacagatctttttggtaacccaatgatgtatgatctaaaggaaaatggtgataaaattccaattacaaatgaaaacaggaaggaatttgtcaatctttattctgactacattctcaataaatcagtagaaaaacagttcaaggcttttcggagaggttttcatatggtgaccaatgaatctcccttaaagtacttattcagaccagaagaaattgaattgcttatatgtggaagccggaatctagatttccaagcactagaagaaactacagaatatgacggtggctataccagggactctgttctgattagggagttctgggaaatcgttcattcatttacagatgaacagaaaagactcttcttgcagtttacaacgggcacagacagagcacctgtgggaggactaggaaaattaaagatgattatagccaaaaatggcccagacacagaaaggttacctacatctcatacttgctttaatgtgcttttacttccggaatactcaagcaaagaaaaacttaaagagagattgttgaaggccatcacgtatgccaaaggatttggcatgctgtaa

SEQ ID NO: 1791 - DNA, 1230 bp, synthetic construct
  source 1..1230: mol_type = other DNA; note = TCF4-(GS)4-E6AP nucleic acid
gatgacctaggcgccaacgacgaactgatttccttcaaagacgagggcgaacaggaggagaagagctccgaaaactcctcggcagagagggatttagctgatgtcaaatcgtctctagtcaatgaatcagaaacgggcagcggcagcggcagcggcagcaatccatatttgagactcaaagttagacgtgaccatatcatagatgatgcacttgtccggctagagatgatcgctatggaaaatcctgcagacttgaagaagcagttgtatgtggaatttgaaggagaacaaggagttgatgagggaggtgtttccaaagaattttttcagctggttgtggaggaaatcttcaatccagatattggtatgttcacatacgatgaatctacaaaattgttttggtttaatccatcttcttttgaaactgagggtcagtttactctgattggcatagtactgggtctggctatttacaataactgtatactggatgtacattttcccatggttgtctacaggaagctaatggggaaaaaaggaacttttcgtgacttgggagactctcacccagttctatatcagagtttaaaagatttattggagtatgaagggaatgtggaagatgacatgatgatcactttccagatatcacagacagatctttttggtaacccaatgatgtatgatctaaaggaaaatggtgataaaattccaattacaaatgaaaacaggaaggaatttgtcaatctttattctgactacattctcaataaatcagtagaaaaacagttcaaggcttttcggagaggttttcatatggtgaccaatgaatctcccttaaagtacttattcagaccagaagaaattgaattgcttatatgtggaagccggaatctagatttccaagcactagaagaaactacagaatatgacggtggctataccagggactctgttctgattagggagttctgggaaatcgttcattcatttacagatgaacagaaaagactcttcttgcagtttacaacgggcacagacagagcacctgtgggaggactaggaaaattaaagatgattatagccaaaaatggcccagacacagaaaggttacctacatctcatacttgctttaatgtgcttttacttccggaatactcaagcaaagaaaaacttaaagagagattgttgaaggccatcacgtatgccaaaggatttggcatgctgtaa

SEQ ID NO: 1792 - DNA, 1236 bp, synthetic construct
  source 1..1236: mol_type = other DNA; note = TCF4-(GS)5-E6AP nucleic acid
gatgacctaggcgccaacgacgaactgatttccttcaaagacgagggcgaacaggaggagaagagctccgaaaactcctcggcagagagggatttagctgatgtcaaatcgtctctagtcaatgaatcagaaacgggcagcggcagcggcagcggcagcggcagcaatccatatttgagactcaaagttagacgtgaccatatcatagatgatgcacttgtccggctagagatgatcgctatggaaaatcctgcagacttgaagaagcagttgtatgtggaatttgaaggagaacaaggagttgatgagggaggtgtttccaaagaattttttcagctggttgtggaggaaatcttcaatccagatattggtatgttcacatacgatgaatctacaaaattgttttggtttaatccatcttcttttgaaactgagggtcagtttactctgattggcatagtactgggtctggctatttacaataactgtatactggatgtacattttcccatggttgtctacaggaagctaatggggaaaaaaggaacttttcgtgacttgggagactctcacccagttctatatcagagtttaaaagatttattggagtatgaagggaatgtggaagatgacatgatgatcactttccagatatcacagacagatctttttggtaacccaatgatgtatgatctaaaggaaaatggtgataaaattccaattacaaatgaaaacaggaaggaatttgtcaatctttattctgactacattctcaataaatcagtagaaaaacagttcaaggcttttcggagaggttttcatatggtgaccaatgaatctcccttaaagtacttattcagaccagaagaaattgaattgcttatatgtggaagccggaatctagatttccaagcactagaagaaactacagaatatgacggtggctataccagggactctgttctgattagggagttctgggaaatcgttcattcatttacagatgaacagaaaagactcttcttgcagtttacaacgggcacagacagagcacctgtgggaggactaggaaaattaaagatgattatagccaaaaatggcccagacacagaaaggttacctacatctcatacttgctttaatgtgcttttacttccggaatactcaagcaaagaaaaacttaaagagagattgttgaaggccatcacgtatgccaaaggatttggcatgctgtaa

SEQ ID NO: 1793 - DNA, 1242 bp, synthetic construct
  source 1..1242: mol_type = other DNA; note = TCF4-(GS)6-E6AP nucleic acid
gatgacctaggcgccaacgacgaactgatttccttcaaagacgagggcgaacaggaggagaagagctccgaaaactcctcggcagagagggatttagctgatgtcaaatcgtctctagtcaatgaatcagaaacgggcagcggcagcggcagcggcagcggcagcggcagcaatccatatttgagactcaaagttagacgtgaccatatcatagatgatgcacttgtccggctagagatgatcgctatggaaaatcctgcagacttgaagaagcagttgtatgtggaatttgaaggagaacaaggagttgatgagggaggtgtttccaaagaattttttcagctggttgtggaggaaatcttcaatccagatattggtatgttcacatacgatgaatctacaaaattgttttggtttaatccatcttcttttgaaactgagggtcagtttactctgattggcatagtactgggtctggctatttacaataactgtatactggatgtacattttcccatggttgtctacaggaagctaatggggaaaaaaggaacttttcgtgacttgggagactctcacccagttctatatcagagtttaaaagatttattggagtatgaagggaatgtggaagatgacatgatgatcactttccagatatcacagacagatctttttggtaacccaatgatgtatgatctaaaggaaaatggtgataaaattccaattacaaatgaaaacaggaaggaatttgtcaatctttattctgactacattctcaataaatcagtagaaaaacagttcaaggcttttcggagaggttttcatatggtgaccaatgaatctcccttaaagtacttattcagaccagaagaaattgaattgcttatatgtggaagccggaatctagatttccaagcactagaagaaactacagaatatgacggtggctataccagggactctgttctgattagggagttctgggaaatcgttcattcatttacagatgaacagaaaagactcttcttgcagtttacaacgggcacagacagagcacctgtgggaggactaggaaaattaaagatgattatagccaaaaatggcccagacacagaaaggttacctacatctcatacttgctttaatgtgcttttacttccggaatactcaagcaaagaaaaacttaaagagagattgttgaaggccatcacgtatgccaaaggatttggcatgctgtaa

SEQ ID NO: 1794 - DNA, 1260 bp, synthetic construct
  source 1..1260: mol_type = other DNA; note = HA-TCF4-(GS)1-E6AP nucleic acid
atgtacccatacgatgttccagattacgctggcagcggcagcggcagcgatgacctaggcgccaacgacgaactgatttccttcaaagacgagggcgaacaggaggagaagagctccgaaaactcctcggcagagagggatttagctgatgtcaaatcgtctctagtcaatgaatcagaaacgggcagcaatccatatttgagactcaaagttagacgtgaccatatcatagatgatgcacttgtccggctagagatgatcgctatggaaaatcctgcagacttgaagaagcagttgtatgtggaatttgaaggagaacaaggagttgatgagggaggtgtttccaaagaattttttcagctggttgtggaggaaatcttcaatccagatattggtatgttcacatacgatgaatctacaaaattgttttggtttaatccatcttcttttgaaactgagggtcagtttactctgattggcatagtactgggtctggctatttacaataactgtatactggatgtacattttcccatggttgtctacaggaagctaatggggaaaaaaggaacttttcgtgacttgggagactctcacccagttctatatcagagtttaaaagatttattggagtatgaagggaatgtggaagatgacatgatgatcactttccagatatcacagacagatctttttggtaacccaatgatgtatgatctaaaggaaaatggtgataaaattccaattacaaatgaaaacaggaaggaatttgtcaatctttattctgactacattctcaataaatcagtagaaaaacagttcaaggcttttcggagaggttttcatatggtgaccaatgaatctcccttaaagtacttattcagaccagaagaaattgaattgcttatatgtggaagccggaatctagatttccaagcactagaagaaactacagaatatgacggtggctataccagggactctgttctgattagggagttctgggaaatcgttcattcatttacagatgaacagaaaagactcttcttgcagtttacaacgggcacagacagagcacctgtgggaggactaggaaaattaaagatgattatagccaaaaatggcccagacacagaaaggttacctacatctcatacttgctttaatgtgcttttacttccggaatactcaagcaaagaaaaacttaaagagagattgttgaaggccatcacgtatgccaaaggatttggcatgctgtaa

SEQ ID NO: 1795 - DNA, 1266 bp, synthetic construct
  source 1..1266: mol_type = other DNA; note = HA-TCF4-(GS)2-E6AP nucleic acid
atgtacccatacgatgttccagattacgctggcagcggcagcggcagcgatgacctaggcgccaacgacgaactgatttccttcaaagacgagggcgaacaggaggagaagagctccgaaaactcctcggcagagagggatttagctgatgtcaaatcgtctctagtcaatgaatcagaaacgggcagcggcagcaatccatatttgagactcaaagttagacgtgaccatatcatagatgatgcacttgtccggctagagatgatcgctatggaaaatcctgcagacttgaagaagcagttgtatgtggaatttgaaggagaacaaggagttgatgagggaggtgtttccaaagaattttttcagctggttgtggaggaaatcttcaatccagatattggtatgttcacatacgatgaatctacaaaattgttttggtttaatccatcttcttttgaaactgagggtcagtttactctgattggcatagtactgggtctggctatttacaataactgtatactggatgtacattttcccatggttgtctacaggaagctaatggggaaaaaaggaacttttcgtgacttgggagactctcacccagttctatatcagagtttaaaagatttattggagtatgaagggaatgtggaagatgacatgatgatcactttccagatatcacagacagatctttttggtaacccaatgatgtatgatctaaaggaaaatggtgataaaattccaattacaaatgaaaacaggaaggaatttgtcaatctttattctgactacattctcaataaatcagtagaaaaacagttcaaggcttttcggagaggttttcatatggtgaccaatgaatctcccttaaagtacttattcagaccagaagaaattgaattgcttatatgtggaagccggaatctagatttccaagcactagaagaaactacagaatatgacggtggctataccagggactctgttctgattagggagttctgggaaatcgttcattcatttacagatgaacagaaaagactcttcttgcagtttacaacgggcacagacagagcacctgtgggaggactaggaaaattaaagatgattatagccaaaaatggcccagacacagaaaggttacctacatctcatacttgctttaatgtgcttttacttccggaatactcaagcaaagaaaaacttaaagagagattgttgaaggccatcacgtatgccaaaggatttggcatgctgtaa

SEQ ID NO: 1796 - DNA, 1272 bp, synthetic construct
  source 1..1272: mol_type = other DNA; note = HA-TCF4-(GS)3-E6AP nucleic acid
atgtacccatacgatgttccagattacgctggcagcggcagcggcagcgatgacctaggcgccaacgacgaactgatttccttcaaagacgagggcgaacaggaggagaagagctccgaaaactcctcggcagagagggatttagctgatgtcaaatcgtctctagtcaatgaatcagaaacgggcagcggcagcggcagcaatccatatttgagactcaaagttagacgtgaccatatcatagatgatgcacttgtccggctagagatgatcgctatggaaaatcctgcagacttgaagaagcagttgtatgtggaatttgaaggagaacaaggagttgatgagggaggtgtttccaaagaattttttcagctggttgtggaggaaatcttcaatccagatattggtatgttcacatacgatgaatctacaaaattgttttggtttaatccatcttcttttgaaactgagggtcagtttactctgattggcatagtactgggtctggctatttacaataactgtatactggatgtacattttcccatggttgtctacaggaagctaatggggaaaaaaggaacttttcgtgacttgggagactctcacccagttctatatcagagtttaaaagatttattggagtatgaagggaatgtggaagatgacatgatgatcactttccagatatcacagacagatctttttggtaacccaatgatgtatgatctaaaggaaaatggtgataaaattccaattacaaatgaaaacaggaaggaatttgtcaatctttattctgactacattctcaataaatcagtagaaaaacagttcaaggcttttcggagaggttttcatatggtgaccaatgaatctcccttaaagtacttattcagaccagaagaaattgaattgcttatatgtggaagccggaatctagatttccaagcactagaagaaactacagaatatgacggtggctataccagggactctgttctgattagggagttctgggaaatcgttcattcatttacagatgaacagaaaagactcttcttgcagtttacaacgggcacagacagagcacctgtgggaggactaggaaaattaaagatgattatagccaaaaatggcccagacacagaaaggttacctacatctcatacttgctttaatgtgcttttacttccggaatactcaagcaaagaaaaacttaaagagagattgttgaaggccatcacgtatgccaaaggatttggcatgctgtaa

SEQ ID NO: 1797 - DNA, 1278 bp, synthetic construct
  source 1..1278: mol_type = other DNA; note = HA-TCF4-(GS)4-E6AP nucleic acid
atgtacccatacgatgttccagattacgctggcagcggcagcggcagcgatgacctaggcgccaacgacgaactgatttccttcaaagacgagggcgaacaggaggagaagagctccgaaaactcctcggcagagagggatttagctgatgtcaaatcgtctctagtcaatgaatcagaaacgggcagcggcagcggcagcggcagcaatccatatttgagactcaaagttagacgtgaccatatcatagatgatgcacttgtccggctagagatgatcgctatggaaaatcctgcagacttgaagaagcagttgtatgtggaatttgaaggagaacaaggagttgatgagggaggtgtttccaaagaattttttcagctggttgtggaggaaatcttcaatccagatattggtatgttcacatacgatgaatctacaaaattgttttggtttaatccatcttcttttgaaactgagggtcagtttactctgattggcatagtactgggtctggctatttacaataactgtatactggatgtacattttcccatggttgtctacaggaagctaatggggaaaaaaggaacttttcgtgacttgggagactctcacccagttctatatcagagtttaaaagatttattggagtatgaagggaatgtggaagatgacatgatgatcactttccagatatcacagacagatctttttggtaacccaatgatgtatgatctaaaggaaaatggtgataaaattccaattacaaatgaaaacaggaaggaatttgtcaatctttattctgactacattctcaataaatcagtagaaaaacagttcaaggcttttcggagaggttttcatatggtgaccaatgaatctcccttaaagtacttattcagaccagaagaaattgaattgcttatatgtggaagccggaatctagatttccaagcactagaagaaactacagaatatgacggtggctataccagggactctgttctgattagggagttctgggaaatcgttcattcatttacagatgaacagaaaagactcttcttgcagtttacaacgggcacagacagagcacctgtgggaggactaggaaaattaaagatgattatagccaaaaatggcccagacacagaaaggttacctacatctcatacttgctttaatgtgcttttacttccggaatactcaagcaaagaaaaacttaaagagagattgttgaaggccatcacgtatgccaaaggatttggcatgctgtaa

SEQ ID NO: 1798 - DNA, 1284 bp, synthetic construct
  source 1..1284: mol_type = other DNA; note = HA-TCF4-(GS)5-E6AP nucleic acid
atgtacccatacgatgttccagattacgctggcagcggcagcggcagcgatgacctaggcgccaacgacgaactgatttccttcaaagacgagggcgaacaggaggagaagagctccgaaaactcctcggcagagagggatttagctgatgtcaaatcgtctctagtcaatgaatcagaaacgggcagcggcagcggcagcggcagcggcagcaatccatatttgagactcaaagttagacgtgaccatatcatagatgatgcacttgtccggctagagatgatcgctatggaaaatcctgcagacttgaagaagcagttgtatgtggaatttgaaggagaacaaggagttgatgagggaggtgtttccaaagaattttttcagctggttgtggaggaaatcttcaatccagatattggtatgttcacatacgatgaatctacaaaattgttttggtttaatccatcttcttttgaaactgagggtcagtttactctgattggcatagtactgggtctggctatttacaataactgtatactggatgtacattttcccatggttgtctacaggaagctaatggggaaaaaaggaacttttcgtgacttgggagactctcacccagttctatatcagagtttaaaagatttattggagtatgaagggaatgtggaagatgacatgatgatcactttccagatatcacagacagatctttttggtaacccaatgatgtatgatctaaaggaaaatggtgataaaattccaattacaaatgaaaacaggaaggaatttgtcaatctttattctgactacattctcaataaatcagtagaaaaacagttcaaggcttttcggagaggttttcatatggtgaccaatgaatctcccttaaagtacttattcagaccagaagaaattgaattgcttatatgtggaagccggaatctagatttccaagcactagaagaaactacagaatatgacggtggctataccagggactctgttctgattagggagttctgggaaatcgttcattcatttacagatgaacagaaaagactcttcttgcagtttacaacgggcacagacagagcacctgtgggaggactaggaaaattaaagatgattatagccaaaaatggcccagacacagaaaggttacctacatctcatacttgctttaatgtgcttttacttccggaatactcaagcaaagaaaaacttaaagagagattgttgaaggccatcacgtatgccaaaggatttggcatgctgtaa

SEQ ID NO: 1799 - DNA, 1290 bp, synthetic construct
  source 1..1290: mol_type = other DNA; note = HA-TCF4-(GS)6-E6AP nucleic acid
atgtacccatacgatgttccagattacgctggcagcggcagcggcagcgatgacctaggcgccaacgacgaactgatttccttcaaagacgagggcgaacaggaggagaagagctccgaaaactcctcggcagagagggatttagctgatgtcaaatcgtctctagtcaatgaatcagaaacgggcagcggcagcggcagcggcagcggcagcggcagcaatccatatttgagactcaaagttagacgtgaccatatcatagatgatgcacttgtccggctagagatgatcgctatggaaaatcctgcagacttgaagaagcagttgtatgtggaatttgaaggagaacaaggagttgatgagggaggtgtttccaaagaattttttcagctggttgtggaggaaatcttcaatccagatattggtatgttcacatacgatgaatctacaaaattgttttggtttaatccatcttcttttgaaactgagggtcagtttactctgattggcatagtactgggtctggctatttacaataactgtatactggatgtacattttcccatggttgtctacaggaagctaatggggaaaaaaggaacttttcgtgacttgggagactctcacccagttctatatcagagtttaaaagatttattggagtatgaagggaatgtggaagatgacatgatgatcactttccagatatcacagacagatctttttggtaacccaatgatgtatgatctaaaggaaaatggtgataaaattccaattacaaatgaaaacaggaaggaatttgtcaatctttattctgactacattctcaataaatcagtagaaaaacagttcaaggcttttcggagaggttttcatatggtgaccaatgaatctcccttaaagtacttattcagaccagaagaaattgaattgcttatatgtggaagccggaatctagatttccaagcactagaagaaactacagaatatgacggtggctataccagggactctgttctgattagggagttctgggaaatcgttcattcatttacagatgaacagaaaagactcttcttgcagtttacaacgggcacagacagagcacctgtgggaggactaggaaaattaaagatgattatagccaaaaatggcccagacacagaaaggttacctacatctcatacttgctttaatgtgcttttacttccggaatactcaagcaaagaaaaacttaaagagagattgttgaaggccatcacgtatgccaaaggatttggcatgctgtaa

SEQ ID NO: 1800 - DNA, 1005 bp, synthetic construct
  source 1..1005: mol_type = other DNA; note = bTRCP-(GS)1-TCF4 nucleic acid
atggacccggccgaggcggtgctgcaagagaaggcactcaagtttatgtgctctatgcccaggtctctgtggctgggctgctccagcctggcggacagcatgccttcgctgcgatgcctgtataacccagggactggcgcactcacagctttccagaattcctcagagagagaagactgtaataatggcgaaccccctaggaagataataccagagaagaattcacttagacagacatacaacagctgtgccagactctgcttaaaccaagaaacagtatgtttagcaagcactgctatgaagactgagaattgtgtggccaaaacaaaacttgccaatggcacttccagtatgattgtgcccaagcaacggaaactctcagcaagctatgaaaaggaaaaggaactgtgtgtcaaatactttgagcagtggtcagagtcagatcaagtggaatttgtggaacatcttatatcccaaatgtgtcattaccaacatgggcacataaactcgtatcttaaacctatgttgcagagagatttcataactgctctgccagctcggggattggatcatatcgctgagaacattctgtcatacctggatgccaaatcactatgtgctgctgaacttgtgtgcaaggaatggtaccgagtgacctctgatggcatgctgtggaagaagcttatcgagagaatggtcaggacagattctctgtggagaggcctggcagaacgaagaggatggggacagtatttattcaaaaacaaacctcctgacgggaatgctcctcccaactctttttatagagcactttatcctaaaattatacaagacattgagacaatagaatctaattcgagaggcagcgatgacctaggcgccaacgacgaactgatttccttcaaagacgagggcgaacaggaggagaagagctccgaaaactcctcggcagagagggatttagctgatgtcaaatcgtctctagtcaatgaatcagaaacgtaa

SEQ ID NO: 1801 - DNA, 1011 bp, synthetic construct
  source 1..1011: mol_type = other DNA; note = bTRCP-(GS)2-TCF4 nucleic acid
atggacccggccgaggcggtgctgcaagagaaggcactcaagtttatgtgctctatgcccaggtctctgtggctgggctgctccagcctggcggacagcatgccttcgctgcgatgcctgtataacccagggactggcgcactcacagctttccagaattcctcagagagagaagactgtaataatggcgaaccccctaggaagataataccagagaagaattcacttagacagacatacaacagctgtgccagactctgcttaaaccaagaaacagtatgtttagcaagcactgctatgaagactgagaattgtgtggccaaaacaaaacttgccaatggcacttccagtatgattgtgcccaagcaacggaaactctcagcaagctatgaaaaggaaaaggaactgtgtgtcaaatactttgagcagtggtcagagtcagatcaagtggaatttgtggaacatcttatatcccaaatgtgtcattaccaacatgggcacataaactcgtatcttaaacctatgttgcagagagatttcataactgctctgccagctcggggattggatcatatcgctgagaacattctgtcatacctggatgccaaatcactatgtgctgctgaacttgtgtgcaaggaatggtaccgagtgacctctgatggcatgctgtggaagaagcttatcgagagaatggtcaggacagattctctgtggagaggcctggcagaacgaagaggatggggacagtatttattcaaaaacaaacctcctgacgggaatgctcctcccaactctttttatagagcactttatcctaaaattatacaagacattgagacaatagaatctaattcgagaggcagcggcagcgatgacctaggcgccaacgacgaactgatttccttcaaagacgagggcgaacaggaggagaagagctccgaaaactcctcggcagagagggatttagctgatgtcaaatcgtctctagtcaatgaatcagaaacgtaa

SEQ ID NO: 1802 - DNA, 1017 bp, synthetic construct
  source 1..1017: mol_type = other DNA; note = bTRCP-(GS)3-TCF4 nucleic acid
atggacccggccgaggcggtgctgcaagagaaggcactcaagtttatgtgctctatgcccaggtctctgtggctgggctgctccagcctggcggacagcatgccttcgctgcgatgcctgtataacccagggactggcgcactcacagctttccagaattcctcagagagagaagactgtaataatggcgaaccccctaggaagataataccagagaagaattcacttagacagacatacaacagctgtgccagactctgcttaaaccaagaaacagtatgtttagcaagcactgctatgaagactgagaattgtgtggccaaaacaaaacttgccaatggcacttccagtatgattgtgcccaagcaacggaaactctcagcaagctatgaaaaggaaaaggaactgtgtgtcaaatactttgagcagtggtcagagtcagatcaagtggaatttgtggaacatcttatatcccaaatgtgtcattaccaacatgggcacataaactcgtatcttaaacctatgttgcagagagatttcataactgctctgccagctcggggattggatcatatcgctgagaacattctgtcatacctggatgccaaatcactatgtgctgctgaacttgtgtgcaaggaatggtaccgagtgacctctgatggcatgctgtggaagaagcttatcgagagaatggtcaggacagattctctgtggagaggcctggcagaacgaagaggatggggacagtatttattcaaaaacaaacctcctgacgggaatgctcctcccaactctttttatagagcactttatcctaaaattatacaagacattgagacaatagaatctaattcgagaggcagcggcagcggcagcgatgacctaggcgccaacgacgaactgatttccttcaaagacgagggcgaacaggaggagaagagctccgaaaactcctcggcagagagggatttagctgatgtcaaatcgtctctagtcaatgaatcagaaacgtaa

SEQ ID NO: 1803 - DNA, 1023 bp, synthetic construct
  source 1..1023: mol_type = other DNA; note = bTRCP-(GS)4-TCF4 nucleic acid
atggacccggccgaggcggtgctgcaagagaaggcactcaagtttatgtgctctatgcccaggtctctgtggctgggctgctccagcctggcggacagcatgccttcgctgcgatgcctgtataacccagggactggcgcactcacagctttccagaattcctcagagagagaagactgtaataatggcgaaccccctaggaagataataccagagaagaattcacttagacagacatacaacagctgtgccagactctgcttaaaccaagaaacagtatgtttagcaagcactgctatgaagactgagaattgtgtggccaaaacaaaacttgccaatggcacttccagtatgattgtgcccaagcaacggaaactctcagcaagctatgaaaaggaaaaggaactgtgtgtcaaatactttgagcagtggtcagagtcagatcaagtggaatttgtggaacatcttatatcccaaatgtgtcattaccaacatgggcacataaactcgtatcttaaacctatgttgcagagagatttcataactgctctgccagctcggggattggatcatatcgctgagaacattctgtcatacctggatgccaaatcactatgtgctgctgaacttgtgtgcaaggaatggtaccgagtgacctctgatggcatgctgtggaagaagcttatcgagagaatggtcaggacagattctctgtggagaggcctggcagaacgaagaggatggggacagtatttattcaaaaacaaacctcctgacgggaatgctcctcccaactctttttatagagcactttatcctaaaattatacaagacattgagacaatagaatctaattcgagaggcagcggcagcggcagcggcagcgatgacctaggcgccaacgacgaactgatttccttcaaagacgagggcgaacaggaggagaagagctccgaaaactcctcggcagagagggatttagctgatgtcaaatcgtctctagtcaatgaatcagaaacgtaa

SEQ ID NO: 1804 - DNA, 1029 bp, synthetic construct
  source 1..1029: mol_type = other DNA; note = bTRCP-(GS)5-TCF4 nucleic acid
atggacccggccgaggcggtgctgcaagagaaggcactcaagtttatgtgctctatgcccaggtctctgtggctgggctgctccagcctggcggacagcatgccttcgctgcgatgcctgtataacccagggactggcgcactcacagctttccagaattcctcagagagagaagactgtaataatggcgaaccccctaggaagataataccagagaagaattcacttagacagacatacaacagctgtgccagactctgcttaaaccaagaaacagtatgtttagcaagcactgctatgaagactgagaattgtgtggccaaaacaaaacttgccaatggcacttccagtatgattgtgcccaagcaacggaaactctcagcaagctatgaaaaggaaaaggaactgtgtgtcaaatactttgagcagtggtcagagtcagatcaagtggaatttgtggaacatcttatatcccaaatgtgtcattaccaacatgggcacataaactcgtatcttaaacctatgttgcagagagatttcataactgctctgccagctcggggattggatcatatcgctgagaacattctgtcatacctggatgccaaatcactatgtgctgctgaacttgtgtgcaaggaatggtaccgagtgacctctgatggcatgctgtggaagaagcttatcgagagaatggtcaggacagattctctgtggagaggcctggcagaacgaagaggatggggacagtatttattcaaaaacaaacctcctgacgggaatgctcctcccaactctttttatagagcactttatcctaaaattatacaagacattgagacaatagaatctaattcgagaggcagcggcagcggcagcggcagcggcagcgatgacctaggcgccaacgacgaactgatttccttcaaagacgagggcgaacaggaggagaagagctccgaaaactcctcggcagagagggatttagctgatgtcaaatcgtctctagtcaatgaatcagaaacgtaa

SEQ ID NO: 1805 - DNA, 1035 bp, synthetic construct
  source 1..1035: mol_type = other DNA; note = bTRCP-(GS)6-TCF4 nucleic acid
atggacccggccgaggcggtgctgcaagagaaggcactcaagtttatgtgctctatgcccaggtctctgtggctgggctgctccagcctggcggacagcatgccttcgctgcgatgcctgtataacccagggactggcgcactcacagctttccagaattcctcagagagagaagactgtaataatggcgaaccccctaggaagataataccagagaagaattcacttagacagacatacaacagctgtgccagactctgcttaaaccaagaaacagtatgtttagcaagcactgctatgaagactgagaattgtgtggccaaaacaaaacttgccaatggcacttccagtatgattgtgcccaagcaacggaaactctcagcaagctatgaaaaggaaaaggaactgtgtgtcaaatactttgagcagtggtcagagtcagatcaagtggaatttgtggaacatcttatatcccaaatgtgtcattaccaacatgggcacataaactcgtatcttaaacctatgttgcagagagatttcataactgctctgccagctcggggattggatcatatcgctgagaacattctgtcatacctggatgccaaatcactatgtgctgctgaacttgtgtgcaaggaatggtaccgagtgacctctgatggcatgctgtggaagaagcttatcgagagaatggtcaggacagattctctgtggagaggcctggcagaacgaagaggatggggacagtatttattcaaaaacaaacctcctgacgggaatgctcctcccaactctttttatagagcactttatcctaaaattatacaagacattgagacaatagaatctaattcgagaggcagcggcagcggcagcggcagcggcagcggcagcgatgacctaggcgccaacgacgaactgatttccttcaaagacgagggcgaacaggaggagaagagctccgaaaactcctcggcagagagggatttagctgatgtcaaatcgtctctagtcaatgaatcagaaacgtaa

SEQ ID NO: 1806 - DNA, 1032 bp, synthetic construct
  source 1..1032: mol_type = other DNA; note = HA-bTRCP-(GS)1-TCF4 nucleic acid
atgtacccatacgatgttccagattacgctgacccggccgaggcggtgctgcaagagaaggcactcaagtttatgtgctctatgcccaggtctctgtggctgggctgctccagcctggcggacagcatgccttcgctgcgatgcctgtataacccagggactggcgcactcacagctttccagaattcctcagagagagaagactgtaataatggcgaaccccctaggaagataataccagagaagaattcacttagacagacatacaacagctgtgccagactctgcttaaaccaagaaacagtatgtttagcaagcactgctatgaagactgagaattgtgtggccaaaacaaaacttgccaatggcacttccagtatgattgtgcccaagcaacggaaactctcagcaagctatgaaaaggaaaaggaactgtgtgtcaaatactttgagcagtggtcagagtcagatcaagtggaatttgtggaacatcttatatcccaaatgtgtcattaccaacatgggcacataaactcgtatcttaaacctatgttgcagagagatttcataactgctctgccagctcggggattggatcatatcgctgagaacattctgtcatacctggatgccaaatcactatgtgctgctgaacttgtgtgcaaggaatggtaccgagtgacctctgatggcatgctgtggaagaagcttatcgagagaatggtcaggacagattctctgtggagaggcctggcagaacgaagaggatggggacagtatttattcaaaaacaaacctcctgacgggaatgctcctcccaactctttttatagagcactttatcctaaaattatacaagacattgagacaatagaatctaattcgagaggcagcgatgacctaggcgccaacgacgaactgatttccttcaaagacgagggcgaacaggaggagaagagctccgaaaactcctcggcagagagggatttagctgatgtcaaatcgtctctagtcaatgaatcagaaacgtaa

SEQ ID NO: 1807 - DNA, 1038 bp, synthetic construct
  source 1..1038: mol_type = other DNA; note = HA-bTRCP-(GS)2-TCF4 nucleic acid
atgtacccatacgatgttccagattacgctgacccggccgaggcggtgctgcaagagaaggcactcaagtttatgtgctctatgcccaggtctctgtggctgggctgctccagcctggcggacagcatgccttcgctgcgatgcctgtataacccagggactggcgcactcacagctttccagaattcctcagagagagaagactgtaataatggcgaaccccctaggaagataataccagagaagaattcacttagacagacatacaacagctgtgccagactctgcttaaaccaagaaacagtatgtttagcaagcactgctatgaagactgagaattgtgtggccaaaacaaaacttgccaatggcacttccagtatgattgtgcccaagcaacggaaactctcagcaagctatgaaaaggaaaaggaactgtgtgtcaaatactttgagcagtggtcagagtcagatcaagtggaatttgtggaacatcttatatcccaaatgtgtcattaccaacatgggcacataaactcgtatcttaaacctatgttgcagagagatttcataactgctctgccagctcggggattggatcatatcgctgagaacattctgtcatacctggatgccaaatcactatgtgctgctgaacttgtgtgcaaggaatggtaccgagtgacctctgatggcatgctgtggaagaagcttatcgagagaatggtcaggacagattctctgtggagaggcctggcagaacgaagaggatggggacagtatttattcaaaaacaaacctcctgacgggaatgctcctcccaactctttttatagagcactttatcctaaaattatacaagacattgagacaatagaatctaattcgagaggcagcggcagcgatgacctaggcgccaacgacgaactgatttccttcaaagacgagggcgaacaggaggagaagagctccgaaaactcctcggcagagagggatttagctgatgtcaaatcgtctctagtcaatgaatcagaaacgtaa

SEQ ID NO: 1808 - DNA, 1044 bp, synthetic construct
  source 1..1044: mol_type = other DNA; note = HA-bTRCP-(GS)3-TCF4 nucleic acid
atgtacccatacgatgttccagattacgctgacccggccgaggcggtgctgcaagagaaggcactcaagtttatgtgctctatgcccaggtctctgtggctgggctgctccagcctggcggacagcatgccttcgctgcgatgcctgtataacccagggactggcgcactcacagctttccagaattcctcagagagagaagactgtaataatggcgaaccccctaggaagataataccagagaagaattcacttagacagacatacaacagctgtgccagactctgcttaaaccaagaaacagtatgtttagcaagcactgctatgaagactgagaattgtgtggccaaaacaaaacttgccaatggcacttccagtatgattgtgcccaagcaacggaaactctcagcaagctatgaaaaggaaaaggaactgtgtgtcaaatactttgagcagtggtcagagtcagatcaagtggaatttgtggaacatcttatatcccaaatgtgtcattaccaacatgggcacataaactcgtatcttaaacctatgttgcagagagatttcataactgctctgccagctcggggattggatcatatcgctgagaacattctgtcatacctggatgccaaatcactatgtgctgctgaacttgtgtgcaaggaatggtaccgagtgacctctgatggcatgctgtggaagaagcttatcgagagaatggtcaggacagattctctgtggagaggcctggcagaacgaagaggatggggacagtatttattcaaaaacaaacctcctgacgggaatgctcctcccaactctttttatagagcactttatcctaaaattatacaagacattgagacaatagaatctaattcgagaggcagcggcagcggcagcgatgacctaggcgccaacgacgaactgatttccttcaaagacgagggcgaacaggaggagaagagctccgaaaactcctcggcagagagggatttagctgatgtcaaatcgtctctagtcaatgaatcagaaacgtaa

SEQ ID NO: 1809 - DNA, 1050 bp, synthetic construct
  source 1..1050: mol_type = other DNA; note = HA-bTRCP-(GS)4-TCF4 nucleic acid
atgtacccatacgatgttccagattacgctgacccggccgaggcggtgctgcaagagaaggcactcaagtttatgtgctctatgcccaggtctctgtggctgggctgctccagcctggcggacagcatgccttcgctgcgatgcctgtataacccagggactggcgcactcacagctttccagaattcctcagagagagaagactgtaataatggcgaaccccctaggaagataataccagagaagaattcacttagacagacatacaacagctgtgccagactctgcttaaaccaagaaacagtatgtttagcaagcactgctatgaagactgagaattgtgtggccaaaacaaaacttgccaatggcacttccagtatgattgtgcccaagcaacggaaactctcagcaagctatgaaaaggaaaaggaactgtgtgtcaaatactttgagcagtggtcagagtcagatcaagtggaatttgtggaacatcttatatcccaaatgtgtcattaccaacatgggcacataaactcgtatcttaaacctatgttgcagagagatttcataactgctctgccagctcggggattggatcatatcgctgagaacattctgtcatacctggatgccaaatcactatgtgctgctgaacttgtgtgcaaggaatggtaccgagtgacctctgatggcatgctgtggaagaagcttatcgagagaatggtcaggacagattctctgtggagaggcctggcagaacgaagaggatggggacagtatttattcaaaaacaaacctcctgacgggaatgctcctcccaactctttttatagagcactttatcctaaaattatacaagacattgagacaatagaatctaattcgagaggcagcggcagcggcagcggcagcgatgacctaggcgccaacgacgaactgatttccttcaaagacgagggcgaacaggaggagaagagctccgaaaactcctcggcagagagggatttagctgatgtcaaatcgtctctagtcaatgaatcagaaacgtaa

SEQ ID NO: 1810 - DNA, 1056 bp, synthetic construct
  source 1..1056: mol_type = other DNA; note = HA-bTRCP-(GS)5-TCF4 nucleic acid
atgtacccatacgatgttccagattacgctgacccggccgaggcggtgctgcaagagaaggcactcaagtttatgtgctctatgcccaggtctctgtggctgggctgctccagcctggcggacagcatgccttcgctgcgatgcctgtataacccagggactggcgcactcacagctttccagaattcctcagagagagaagactgtaataatggcgaaccccctaggaagataataccagagaagaattcacttagacagacatacaacagctgtgccagactctgcttaaaccaagaaacagtatgtttagcaagcactgctatgaagactgagaattgtgtggccaaaacaaaacttgccaatggcacttccagtatgattgtgcccaagcaacggaaactctcagcaagctatgaaaaggaaaaggaactgtgtgtcaaatactttgagcagtggtcagagtcagatcaagtggaatttgtggaacatcttatatcccaaatgtgtcattaccaacatgggcacataaactcgtatcttaaacctatgttgcagagagatttcataactgctctgccagctcggggattggatcatatcgctgagaacattctgtcatacctggatgccaaatcactatgtgctgctgaacttgtgtgcaaggaatggtaccgagtgacctctgatggcatgctgtggaagaagcttatcgagagaatggtcaggacagattctctgtggagaggcctggcagaacgaagaggatggggacagtatttattcaaaaacaaacctcctgacgggaatgctcctcccaactctttttatagagcactttatcctaaaattatacaagacattgagacaatagaatctaattcgagaggcagcggcagcggcagcggcagcggcagcgatgacctaggcgccaacgacgaactgatttccttcaaagacgagggcgaacaggaggagaagagctccgaaaactcctcggcagagagggatttagctgatgtcaaatcgtctctagtcaatgaatcagaaacgtaa

SEQ ID NO: 1811 - DNA, 1062 bp, synthetic construct
  source 1..1062: mol_type = other DNA; note = HA-bTRCP-(GS)6-TCF4 nucleic acid
atgtacccatacgatgttccagattacgctgacccggccgaggcggtgctgcaagagaaggcactcaagtttatgtgctctatgcccaggtctctgtggctgggctgctccagcctggcggacagcatgccttcgctgcgatgcctgtataacccagggactggcgcactcacagctttccagaattcctcagagagagaagactgtaataatggcgaaccccctaggaagataataccagagaagaattcacttagacagacatacaacagctgtgccagactctgcttaaaccaagaaacagtatgtttagcaagcactgctatgaagactgagaattgtgtggccaaaacaaaacttgccaatggcacttccagtatgattgtgcccaagcaacggaaactctcagcaagctatgaaaaggaaaaggaactgtgtgtcaaatactttgagcagtggtcagagtcagatcaagtggaatttgtggaacatcttatatcccaaatgtgtcattaccaacatgggcacataaactcgtatcttaaacctatgttgcagagagatttcataactgctctgccagctcggggattggatcatatcgctgagaacattctgtcatacctggatgccaaatcactatgtgctgctgaacttgtgtgcaaggaatggtaccgagtgacctctgatggcatgctgtggaagaagcttatcgagagaatggtcaggacagattctctgtggagaggcctggcagaacgaagaggatggggacagtatttattcaaaaacaaacctcctgacgggaatgctcctcccaactctttttatagagcactttatcctaaaattatacaagacattgagacaatagaatctaattcgagaggcagcggcagcggcagcggcagcggcagcggcagcgatgacctaggcgccaacgacgaactgatttccttcaaagacgagggcgaacaggaggagaagagctccgaaaactcctcggcagagagggatttagctgatgtcaaatcgtctctagtcaatgaatcagaaacgtaa

SEQ ID NO: 1812 - DNA, 1107 bp, synthetic construct
  source 1..1107: mol_type = other DNA; note = Keap1-(GS)1-TCF4 nucleic acid
cagccagatcccaggcctagcggggctggggcctgctgccgattcctgcccctgcagtcacagtgccctgagggggcaggggacgcggtgatgtacgcctccactgagtgcaaggcggaggtgacgccctcccagcatggcaaccgcaccttcagctacaccctggaggatcataccaagcaggcctttggcatcatgaacgagctgcggctcagccagcagctgtgtgacgtcacactgcaggtcaagtaccaggatgcaccggccgcccagttcatggcccacaaggtggtgctggcctcatccagccctgtcttcaaggccatgttcaccaacgggctgcgggagcagggcatggaggtggtgtccattgagggtatccaccccaaggtcatggagcgcctcattgaattcgcctacacggcctccatctccatgggcgagaagtgtgtcctccacgtcatgaacggtgctgtcatgtaccagatcgacagcgttgtccgtgcctgcagtgacttcctggtgcagcagctggaccccagcaatgccatcggcatcgccaacttcgctgagcagattggctgtgtggagttgcaccagcgtgcccgggagtacatctacatgcattttggggaggtggccaagcaagaggagttcttcaacctgtcccactgccaactggtgaccctcatcagccgggacgacctgaacgtgcgctgcgagtccgaggtcttccacgcctgcatcaactgggtcaagtacgactgcgaacagcgacggttctacgtccaggcgctgctgcgggccgtgcgctgccactcgttgacgccgaacttcctgcagatgcagctgcagaagtgcgagatcctgcagtccgactcccgctgcaaggactacctggtcaagatcttcgaggagctcaccctgcacaagcccacgcaggtgatgccctgccgggcgcccggcagcgatgacctaggcgccaacgacgaactgatttccttcaaagacgagggcgaacaggaggagaagagctccgaaaactcctcggcagagagggatttagctgatgtcaaatcgtctctagtcaatgaatcagaaacgtaa

SEQ ID NO: 1813 - DNA, 1113 bp, synthetic construct
  source 1..1113: mol_type = other DNA; note = Keap1-(GS)2-TCF4 nucleic acid
cagccagatcccaggcctagcggggctggggcctgctgccgattcctgcccctgcagtcacagtgccctgagggggcaggggacgcggtgatgtacgcctccactgagtgcaaggcggaggtgacgccctcccagcatggcaaccgcaccttcagctacaccctggaggatcataccaagcaggcctttggcatcatgaacgagctgcggctcagccagcagctgtgtgacgtcacactgcaggtcaagtaccaggatgcaccggccgcccagttcatggcccacaaggtggtgctggcctcatccagccctgtcttcaaggccatgttcaccaacgggctgcgggagcagggcatggaggtggtgtccattgagggtatccaccccaaggtcatggagcgcctcattgaattcgcctacacggcctccatctccatgggcgagaagtgtgtcctccacgtcatgaacggtgctgtcatgtaccagatcgacagcgttgtccgtgcctgcagtgacttcctggtgcagcagctggaccccagcaatgccatcggcatcgccaacttcgctgagcagattggctgtgtggagttgcaccagcgtgcccgggagtacatctacatgcattttggggaggtggccaagcaagaggagttcttcaacctgtcccactgccaactggtgaccctcatcagccgggacgacctgaacgtgcgctgcgagtccgaggtcttccacgcctgcatcaactgggtcaagtacgactgcgaacagcgacggttctacgtccaggcgctgctgcgggccgtgcgctgccactcgttgacgccgaacttcctgcagatgcagctgcagaagtgcgagatcctgcagtccgactcccgctgcaaggactacctggtcaagatcttcgaggagctcaccctgcacaagcccacgcaggtgatgccctgccgggcgcccggcagcggcagcgatgacctaggcgccaacgacgaactgatttccttcaaagacgagggcgaacaggaggagaagagctccgaaaactcctcggcagagagggatttagctgatgtcaaatcgtctctagtcaatgaatcagaaacgtaa

SEQ ID NO: 1814 - DNA, 1119 bp, synthetic construct
  source 1..1119: mol_type = other DNA; note = Keap1-(GS)3-TCF4 nucleic acid
cagccagatcccaggcctagcggggctggggcctgctgccgattcctgcccctgcagtcacagtgccctgagggggcaggggacgcggtgatgtacgcctccactgagtgcaaggcggaggtgacgccctcccagcatggcaaccgcaccttcagctacaccctggaggatcataccaagcaggcctttggcatcatgaacgagctgcggctcagccagcagctgtgtgacgtcacactgcaggtcaagtaccaggatgcaccggccgcccagttcatggcccacaaggtggtgctggcctcatccagccctgtcttcaaggccatgttcaccaacgggctgcgggagcagggcatggaggtggtgtccattgagggtatccaccccaaggtcatggagcgcctcattgaattcgcctacacggcctccatctccatgggcgagaagtgtgtcctccacgtcatgaacggtgctgtcatgtaccagatcgacagcgttgtccgtgcctgcagtgacttcctggtgcagcagctggaccccagcaatgccatcggcatcgccaacttcgctgagcagattggctgtgtggagttgcaccagcgtgcccgggagtacatctacatgcattttggggaggtggccaagcaagaggagttcttcaacctgtcccactgccaactggtgaccctcatcagccgggacgacctgaacgtgcgctgcgagtccgaggtcttccacgcctgcatcaactgggtcaagtacgactgcgaacagcgacggttctacgtccaggcgctgctgcgggccgtgcgctgccactcgttgacgccgaacttcctgcagatgcagctgcagaagtgcgagatcctgcagtccgactcccgctgcaaggactacctggtcaagatcttcgaggagctcaccctgcacaagcccacgcaggtgatgccctgccgggcgcccggcagcggcagcggcagcgatgacctaggcgccaacgacgaactgatttccttcaaagacgagggcgaacaggaggagaagagctccgaaaactcctcggcagagagggatttagctgatgtcaaatcgtctctagtcaatgaatcagaaacgtaa

SEQ ID NO: 1815 - DNA, 1125 bp, synthetic construct
  source 1..1125: mol_type = other DNA; note = Keap1-(GS)4-TCF4 nucleic acid
cagccagatcccaggcctagcggggctggggcctgctgccgattcctgcccctgcagtcacagtgccctgagggggcaggggacgcggtgatgtacgcctccactgagtgcaaggcggaggtgacgccctcccagcatggcaaccgcaccttcagctacaccctggaggatcataccaagcaggcctttggcatcatgaacgagctgcggctcagccagcagctgtgtgacgtcacactgcaggtcaagtaccaggatgcaccggccgcccagttcatggcccacaaggtggtgctggcctcatccagccctgtcttcaaggccatgttcaccaacgggctgcgggagcagggcatggaggtggtgtccattgagggtatccaccccaaggtcatggagcgcctcattgaattcgcctacacggcctccatctccatgggcgagaagtgtgtcctccacgtcatgaacggtgctgtcatgtaccagatcgacagcgttgtccgtgcctgcagtgacttcctggtgcagcagctggaccccagcaatgccatcggcatcgccaacttcgctgagcagattggctgtgtggagttgcaccagcgtgcccgggagtacatctacatgcattttggggaggtggccaagcaagaggagttcttcaacctgtcccactgccaactggtgaccctcatcagccgggacgacctgaacgtgcgctgcgagtccgaggtcttccacgcctgcatcaactgggtcaagtacgactgcgaacagcgacggttctacgtccaggcgctgctgcgggccgtgcgctgccactcgttgacgccgaacttcctgcagatgcagctgcagaagtgcgagatcctgcagtccgactcccgctgcaaggactacctggtcaagatcttcgaggagctcaccctgcacaagcccacgcaggtgatgccctgccgggcgcccggcagcggcagcggcagcggcagcgatgacctaggcgccaacgacgaactgatttccttcaaagacgagggcgaacaggaggagaagagctccgaaaactcctcggcagagagggatttagctgatgtcaaatcgtctctagtcaatgaatcagaaacgtaa

SEQ ID NO: 1816 - DNA, 1131 bp, synthetic construct
  source 1..1131: mol_type = other DNA; note = Keap1-(GS)5-TCF4 nucleic acid
cagccagatcccaggcctagcggggctggggcctgctgccgattcctgcccctgcagtcacagtgccctgagggggcaggggacgcggtgatgtacgcctccactgagtgcaaggcggaggtgacgccctcccagcatggcaaccgcaccttcagctacaccctggaggatcataccaagcaggcctttggcatcatgaacgagctgcggctcagccagcagctgtgtgacgtcacactgcaggtcaagtaccaggatgcaccggccgcccagttcatggcccacaaggtggtgctggcctcatccagccctgtcttcaaggccatgttcaccaacgggctgcgggagcagggcatggaggtggtgtccattgagggtatccaccccaaggtcatggagcgcctcattgaattcgcctacacggcctccatctccatgggcgagaagtgtgtcctccacgtcatgaacggtgctgtcatgtaccagatcgacagcgttgtccgtgcctgcagtgacttcctggtgcagcagctggaccccagcaatgccatcggcatcgccaacttcgctgagcagattggctgtgtggagttgcaccagcgtgcccgggagtacatctacatgcattttggggaggtggccaagcaagaggagttcttcaacctgtcccactgccaactggtgaccctcatcagccgggacgacctgaacgtgcgctgcgagtccgaggtcttccacgcctgcatcaactgggtcaagtacgactgcgaacagcgacggttctacgtccaggcgctgctgcgggccgtgcgctgccactcgttgacgccgaacttcctgcagatgcagctgcagaagtgcgagatcctgcagtccgactcccgctgcaaggactacctggtcaagatcttcgaggagctcaccctgcacaagcccacgcaggtgatgccctgccgggcgcccggcagcggcagcggcagcggcagcggcagcgatgacctaggcgccaacgacgaactgatttccttcaaagacgagggcgaacaggaggagaagagctccgaaaactcctcggcagagagggatttagctgatgtcaaatcgtctctagtcaatgaatcagaaacgtaa

SEQ ID NO: 1817 - DNA, 1137 bp, synthetic construct
  source 1..1137: mol_type = other DNA; note = Keap1-(GS)6-TCF4 nucleic acid
cagccagatcccaggcctagcggggctggggcctgctgccgattcctgcccctgcagtcacagtgccctgagggggcaggggacgcggtgatgtacgcctccactgagtgcaaggcggaggtgacgccctcccagcatggcaaccgcaccttcagctacaccctggaggatcataccaagcaggcctttggcatcatgaacgagctgcggctcagccagcagctgtgtgacgtcacactgcaggtcaagtaccaggatgcaccggccgcccagttcatggcccacaaggtggtgctggcctcatccagccctgtcttcaaggccatgttcaccaacgggctgcgggagcagggcatggaggtggtgtccattgagggtatccaccccaaggtcatggagcgcctcattgaattcgcctacacggcctccatctccatgggcgagaagtgtgtcctccacgtcatgaacggtgctgtcatgtaccagatcgacagcgttgtccgtgcctgcagtgacttcctggtgcagcagctggaccccagcaatgccatcggcatcgccaacttcgctgagcagattggctgtgtggagttgcaccagcgtgcccgggagtacatctacatgcattttggggaggtggccaagcaagaggagttcttcaacctgtcccactgccaactggtgaccctcatcagccgggacgacctgaacgtgcgctgcgagtccgaggtcttccacgcctgcatcaactgggtcaagtacgactgcgaacagcgacggttctacgtccaggcgctgctgcgggccgtgcgctgccactcgttgacgccgaacttcctgcagatgcagctgcagaagtgcgagatcctgcagtccgactcccgctgcaaggactacctggtcaagatcttcgaggagctcaccctgcacaagcccacgcaggtgatgccctgccgggcgcccggcagcggcagcggcagcggcagcggcagcggcagcgatgacctaggcgccaacgacgaactgatttccttcaaagacgagggcgaacaggaggagaagagctccgaaaactcctcggcagagagggatttagctgatgtcaaatcgtctctagtcaatgaatcagaaacgtaa

SEQ ID NO: 1818 - DNA, 1155 bp, synthetic construct
  source 1..1155: mol_type = other DNA; note = HA-Keap1-(GS)1-TCF4 nucleic acid
atgtacccatacgatgttccagattacgctggcagcggcagcggcagccagccagatcccaggcctagcggggctggggcctgctgccgattcctgcccctgcagtcacagtgccctgagggggcaggggacgcggtgatgtacgcctccactgagtgcaaggcggaggtgacgccctcccagcatggcaaccgcaccttcagctacaccctggaggatcataccaagcaggcctttggcatcatgaacgagctgcggctcagccagcagctgtgtgacgtcacactgcaggtcaagtaccaggatgcaccggccgcccagttcatggcccacaaggtggtgctggcctcatccagccctgtcttcaaggccatgttcaccaacgggctgcgggagcagggcatggaggtggtgtccattgagggtatccaccccaaggtcatggagcgcctcattgaattcgcctacacggcctccatctccatgggcgagaagtgtgtcctccacgtcatgaacggtgctgtcatgtaccagatcgacagcgttgtccgtgcctgcagtgacttcctggtgcagcagctggaccccagcaatgccatcggcatcgccaacttcgctgagcagattggctgtgtggagttgcaccagcgtgcccgggagtacatctacatgcattttggggaggtggccaagcaagaggagttcttcaacctgtcccactgccaactggtgaccctcatcagccgggacgacctgaacgtgcgctgcgagtccgaggtcttccacgcctgcatcaactgggtcaagtacgactgcgaacagcgacggttctacgtccaggcgctgctgcgggccgtgcgctgccactcgttgacgccgaacttcctgcagatgcagctgcagaagtgcgagatcctgcagtccgactcccgctgcaaggactacctggtcaagatcttcgaggagctcaccctgcacaagcccacgcaggtgatgccctgccgggcgcccggcagcgatgacctaggcgccaacgacgaactgatttccttcaaagacgagggcgaacaggaggagaagagctccgaaaactcctcggcagagagggatttagctgatgtcaaatcgtctctagtcaatgaatcagaaacgtaa

SEQ ID NO: 1819 - DNA, 1161 bp, synthetic construct
  source 1..1161: mol_type = other DNA; note = HA-Keap1-(GS)2-TCF4 nucleic acid
atgtacccatacgatgttccagattacgctggcagcggcagcggcagccagccagatcccaggcctagcggggctggggcctgctgccgattcctgcccctgcagtcacagtgccctgagggggcaggggacgcggtgatgtacgcctccactgagtgcaaggcggaggtgacgccctcccagcatggcaaccgcaccttcagctacaccctggaggatcataccaagcaggcctttggcatcatgaacgagctgcggctcagccagcagctgtgtgacgtcacactgcaggtcaagtaccaggatgcaccggccgcccagttcatggcccacaaggtggtgctggcctcatccagccctgtcttcaaggccatgttcaccaacgggctgcgggagcagggcatggaggtggtgtccattgagggtatccaccccaaggtcatggagcgcctcattgaattcgcctacacggcctccatctccatgggcgagaagtgtgtcctccacgtcatgaacggtgctgtcatgtaccagatcgacagcgttgtccgtgcctgcagtgacttcctggtgcagcagctggaccccagcaatgccatcggcatcgccaacttcgctgagcagattggctgtgtggagttgcaccagcgtgcccgggagtacatctacatgcattttggggaggtggccaagcaagaggagttcttcaacctgtcccactgccaactggtgaccctcatcagccgggacgacctgaacgtgcgctgcgagtccgaggtcttccacgcctgcatcaactgggtcaagtacgactgcgaacagcgacggttctacgtccaggcgctgctgcgggccgtgcgctgccactcgttgacgccgaacttcctgcagatgcagctgcagaagtgcgagatcctgcagtccgactcccgctgcaaggactacctggtcaagatcttcgaggagctcaccctgcacaagcccacgcaggtgatgccctgccgggcgcccggcagcggcagcgatgacctaggcgccaacgacgaactgatttccttcaaagacgagggcgaacaggaggagaagagctccgaaaactcctcggcagagagggatttagctgatgtcaaatcgtctctagtcaatgaatcagaaacgtaa

SEQ ID NO: 1820 - DNA, 1167 bp, synthetic construct
  source 1..1167: mol_type = other DNA; note = HA-Keap1-(GS)3-TCF4 nucleic acid
atgtacccatacgatgttccagattacgctggcagcggcagcggcagccagccagatcccaggcctagcggggctggggcctgctgccgattcctgcccctgcagtcacagtgccctgagggggcaggggacgcggtgatgtacgcctccactgagtgcaaggcggaggtgacgccctcccagcatggcaaccgcaccttcagctacaccctggaggatcataccaagcaggcctttggcatcatgaacgagctgcggctcagccagcagctgtgtgacgtcacactgcaggtcaagtaccaggatgcaccggccgcccagttcatggcccacaaggtggtgctggcctcatccagccctgtcttcaaggccatgttcaccaacgggctgcgggagcagggcatggaggtggtgtccattgagggtatccaccccaaggtcatggagcgcctcattgaattcgcctacacggcctccatctccatgggcgagaagtgtgtcctccacgtcatgaacggtgctgtcatgtaccagatcgacagcgttgtccgtgcctgcagtgacttcctggtgcagcagctggaccccagcaatgccatcggcatcgccaacttcgctgagcagattggctgtgtggagttgcaccagcgtgcccgggagtacatctacatgcattttggggaggtggccaagcaagaggagttcttcaacctgtcccactgccaactggtgaccctcatcagccgggacgacctgaacgtgcgctgcgagtccgaggtcttccacgcctgcatcaactgggtcaagtacgactgcgaacagcgacggttctacgtccaggcgctgctgcgggccgtgcgctgccactcgttgacgccgaacttcctgcagatgcagctgcagaagtgcgagatcctgcagtccgactcccgctgcaaggactacctggtcaagatcttcgaggagctcaccctgcacaagcccacgcaggtgatgccctgccgggcgcccggcagcggcagcggcagcgatgacctaggcgccaacgacgaactgatttccttcaaagacgagggcgaacaggaggagaagagctccgaaaactcctcggcagagagggatttagctgatgtcaaatcgtctctagtcaatgaatcagaaacgtaa

SEQ ID NO: 1821 - DNA, 1173 bp, synthetic construct
  source 1..1173: mol_type = other DNA; note = HA-Keap1-(GS)4-TCF4 nucleic acid
atgtacccatacgatgttccagattacgctggcagcggcagcggcagccagccagatcccaggcctagcggggctggggcctgctgccgattcctgcccctgcagtcacagtgccctgagggggcaggggacgcggtgatgtacgcctccactgagtgcaaggcggaggtgacgccctcccagcatggcaaccgcaccttcagctacaccctggaggatcataccaagcaggcctttggcatcatgaacgagctgcggctcagccagcagctgtgtgacgtcacactgcaggtcaagtaccaggatgcaccggccgcccagttcatggcccacaaggtggtgctggcctcatccagccctgtcttcaaggccatgttcaccaacgggctgcgggagcagggcatggaggtggtgtccattgagggtatccaccccaaggtcatggagcgcctcattgaattcgcctacacggcctccatctccatgggcgagaagtgtgtcctccacgtcatgaacggtgctgtcatgtaccagatcgacagcgttgtccgtgcctgcagtgacttcctggtgcagcagctggaccccagcaatgccatcggcatcgccaacttcgctgagcagattggctgtgtggagttgcaccagcgtgcccgggagtacatctacatgcattttggggaggtggccaagcaagaggagttcttcaacctgtcccactgccaactggtgaccctcatcagccgggacgacctgaacgtgcgctgcgagtccgaggtcttccacgcctgcatcaactgggtcaagtacgactgcgaacagcgacggttctacgtccaggcgctgctgcgggccgtgcgctgccactcgttgacgccgaacttcctgcagatgcagctgcagaagtgcgagatcctgcagtccgactcccgctgcaaggactacctggtcaagatcttcgaggagctcaccctgcacaagcccacgcaggtgatgccctgccgggcgcccggcagcggcagcggcagcggcagcgatgacctaggcgccaacgacgaactgatttccttcaaagacgagggcgaacaggaggagaagagctccgaaaactcctcggcagagagggatttagctgatgtcaaatcgtctctagtcaatgaatcagaaacgtaa

SEQ ID NO: 1822 - DNA, 1179 bp, synthetic construct
  source 1..1179: mol_type = other DNA; note = HA-Keap1-(GS)5-TCF4 nucleic acid
atgtacccatacgatgttccagattacgctggcagcggcagcggcagccagccagatcccaggcctagcggggctggggcctgctgccgattcctgcccctgcagtcacagtgccctgagggggcaggggacgcggtgatgtacgcctccactgagtgcaaggcggaggtgacgccctcccagcatggcaaccgcaccttcagctacaccctggaggatcataccaagcaggcctttggcatcatgaacgagctgcggctcagccagcagctgtgtgacgtcacactgcaggtcaagtaccaggatgcaccggccgcccagttcatggcccacaaggtggtgctggcctcatccagccctgtcttcaaggccatgttcaccaacgggctgcgggagcagggcatggaggtggtgtccattgagggtatccaccccaaggtcatggagcgcctcattgaattcgcctacacggcctccatctccatgggcgagaagtgtgtcctccacgtcatgaacggtgctgtcatgtaccagatcgacagcgttgtccgtgcctgcagtgacttcctggtgcagcagctggaccccagcaatgccatcggcatcgccaacttcgctgagcagattggctgtgtggagttgcaccagcgtgcccgggagtacatctacatgcattttggggaggtggccaagcaagaggagttcttcaacctgtcccactgccaactggtgaccctcatcagccgggacgacctgaacgtgcgctgcgagtccgaggtcttccacgcctgcatcaactgggtcaagtacgactgcgaacagcgacggttctacgtccaggcgctgctgcgggccgtgcgctgccactcgttgacgccgaacttcctgcagatgcagctgcagaagtgcgagatcctgcagtccgactcccgctgcaaggactacctggtcaagatcttcgaggagctcaccctgcacaagcccacgcaggtgatgccctgccgggcgcccggcagcggcagcggcagcggcagcggcagcgatgacctaggcgccaacgacgaactgatttccttcaaagacgagggcgaacaggaggagaagagctccgaaaactcctcggcagagagggatttagctgatgtcaaatcgtctctagtcaatgaatcagaaacgtaa

SEQ ID NO: 1823 - DNA, 1185 bp, synthetic construct
  source 1..1185: mol_type = other DNA; note = HA-Keap1-(GS)6-TCF4 nucleic acid
atgtacccatacgatgttccagattacgctggcagcggcagcggcagccagccagatcccaggcctagcggggctggggcctgctgccgattcctgcccctgcagtcacagtgccctgagggggcaggggacgcggtgatgtacgcctccactgagtgcaaggcggaggtgacgccctcccagcatggcaaccgcaccttcagctacaccctggaggatcataccaagcaggcctttggcatcatgaacgagctgcggctcagccagcagctgtgtgacgtcacactgcaggtcaagtaccaggatgcaccggccgcccagttcatggcccacaaggtggtgctggcctcatccagccctgtcttcaaggccatgttcaccaacgggctgcgggagcagggcatggaggtggtgtccattgagggtatccaccccaaggtcatggagcgcctcattgaattcgcctacacggcctccatctccatgggcgagaagtgtgtcctccacgtcatgaacggtgctgtcatgtaccagatcgacagcgttgtccgtgcctgcagtgacttcctggtgcagcagctggaccccagcaatgccatcggcatcgccaacttcgctgagcagattggctgtgtggagttgcaccagcgtgcccgggagtacatctacatgcattttggggaggtggccaagcaagaggagttcttcaacctgtcccactgccaactggtgaccctcatcagccgggacgacctgaacgtgcgctgcgagtccgaggtcttccacgcctgcatcaactgggtcaagtacgactgcgaacagcgacggttctacgtccaggcgctgctgcgggccgtgcgctgccactcgttgacgccgaacttcctgcagatgcagctgcagaagtgcgagatcctgcagtccgactcccgctgcaaggactacctggtcaagatcttcgaggagctcaccctgcacaagcccacgcaggtgatgccctgccgggcgcccggcagcggcagcggcagcggcagcggcagcggcagcgatgacctaggcgccaacgacgaactgatttccttcaaagacgagggcgaacaggaggagaagagctccgaaaactcctcggcagagagggatttagctgatgtcaaatcgtctctagtcaatgaatcagaaacgtaa

SEQ ID NO: 1824 - DNA, 525 bp, synthetic construct
  source 1..525: mol_type = other DNA; note = RNF125-(GS)1-TCF4 nucleic acid
ggctccgtgctgagcaccgacagcggcaaatcggcgcccgcctctgccaccgcgcgggccctggagcgcaggagggacccggagttgcccgtcacgtccttcgactgcgccgtgtgccttgaggtgttacaccagcctgtccggacccgctgcggccacgtattctgccgttcctgtattgctaccagtctgaagaacaacaagtggacctgtccttattgccgggcatatcttccttcagaaggagttccagcaactgatgtagccaaaagaatgaaatcagagtataagaactgcgctgagtgtgacaccctggtttgcctcagtgaaatgagggcacatattcggacttgtcagaagtacatagataagtatggaccaggcagcgatgacctaggcgccaacgacgaactgatttccttcaaagacgagggcgaacaggaggagaagagctccgaaaactcctcggcagagagggatttagctgatgtcaaatcgtctctagtcaatgaatcagaaacgtaa

SEQ ID NO: 1825 - DNA, 531 bp, synthetic construct
  source 1..531: mol_type = other DNA; note = RNF125-(GS)2-TCF4 nucleic acid
ggctccgtgctgagcaccgacagcggcaaatcggcgcccgcctctgccaccgcgcgggccctggagcgcaggagggacccggagttgcccgtcacgtccttcgactgcgccgtgtgccttgaggtgttacaccagcctgtccggacccgctgcggccacgtattctgccgttcctgtattgctaccagtctgaagaacaacaagtggacctgtccttattgccgggcatatcttccttcagaaggagttccagcaactgatgtagccaaaagaatgaaatcagagtataagaactgcgctgagtgtgacaccctggtttgcctcagtgaaatgagggcacatattcggacttgtcagaagtacatagataagtatggaccaggcagcggcagcgatgacctaggcgccaacgacgaactgatttccttcaaagacgagggcgaacaggaggagaagagctccgaaaactcctcggcagagagggatttagctgatgtcaaatcgtctctagtcaatgaatcagaaacgtaa

SEQ ID NO: 1826 - DNA, 537 bp, synthetic construct
  source 1..537: mol_type = other DNA; note = RNF125-(GS)3-TCF4 nucleic acid
ggctccgtgctgagcaccgacagcggcaaatcggcgcccgcctctgccaccgcgcgggccctggagcgcaggagggacccggagttgcccgtcacgtccttcgactgcgccgtgtgccttgaggtgttacaccagcctgtccggacccgctgcggccacgtattctgccgttcctgtattgctaccagtctgaagaacaacaagtggacctgtccttattgccgggcatatcttccttcagaaggagttccagcaactgatgtagccaaaagaatgaaatcagagtataagaactgcgctgagtgtgacaccctggtttgcctcagtgaaatgagggcacatattcggacttgtcagaagtacatagataagtatggaccaggcagcggcagcggcagcgatgacctaggcgccaacgacgaactgatttccttcaaagacgagggcgaacaggaggagaagagctccgaaaactcctcggcagagagggatttagctgatgtcaaatcgtctctagtcaatgaatcagaaacgtaa

SEQ ID NO: 1827 - DNA, 543 bp, synthetic construct
  source 1..543: mol_type = other DNA; note = RNF125-(GS)4-TCF4 nucleic acid
ggctccgtgctgagcaccgacagcggcaaatcggcgcccgcctctgccaccgcgcgggccctggagcgcaggagggacccggagttgcccgtcacgtccttcgactgcgccgtgtgccttgaggtgttacaccagcctgtccggacccgctgcggccacgtattctgccgttcctgtattgctaccagtctgaagaacaacaagtggacctgtccttattgccgggcatatcttccttcagaaggagttccagcaactgatgtagccaaaagaatgaaatcagagtataagaactgcgctgagtgtgacaccctggtttgcctcagtgaaatgagggcacatattcggacttgtcagaagtacatagataagtatggaccaggcagcggcagcggcagcggcagcgatgacctaggcgccaacgacgaactgatttccttcaaagacgagggcgaacaggaggagaagagctccgaaaactcctcggcagagagggatttagctgatgtcaaatcgtctctagtcaatgaatcagaaacgtaa

SEQ ID NO: 1828 - DNA, 549 bp, synthetic construct
  source 1..549: mol_type = other DNA; note = RNF125-(GS)5-TCF4 nucleic acid
ggctccgtgctgagcaccgacagcggcaaatcggcgcccgcctctgccaccgcgcgggccctggagcgcaggagggacccggagttgcccgtcacgtccttcgactgcgccgtgtgccttgaggtgttacaccagcctgtccggacccgctgcggccacgtattctgccgttcctgtattgctaccagtctgaagaacaacaagtggacctgtccttattgccgggcatatcttccttcagaaggagttccagcaactgatgtagccaaaagaatgaaatcagagtataagaactgcgctgagtgtgacaccctggtttgcctcagtgaaatgagggcacatattcggacttgtcagaagtacatagataagtatggaccaggcagcggcagcggcagcggcagcggcagcgatgacctaggcgccaacgacgaactgatttccttcaaagacgagggcgaacaggaggagaagagctccgaaaactcctcggcagagagggatttagctgatgtcaaatcgtctctagtcaatgaatcagaaacgtaa

SEQ ID NO: 1829 - DNA, 555 bp, synthetic construct
  source 1..555: mol_type = other DNA; note = RNF125-(GS)6-TCF4 nucleic acid
ggctccgtgctgagcaccgacagcggcaaatcggcgcccgcctctgccaccgcgcgggccctggagcgcaggagggacccggagttgcccgtcacgtccttcgactgcgccgtgtgccttgaggtgttacaccagcctgtccggacccgctgcggccacgtattctgccgttcctgtattgctaccagtctgaagaacaacaagtggacctgtccttattgccgggcatatcttccttcagaaggagttccagcaactgatgtagccaaaagaatgaaatcagagtataagaactgcgctgagtgtgacaccctggtttgcctcagtgaaatgagggcacatattcggacttgtcagaagtacatagataagtatggaccaggcagcggcagcggcagcggcagcggcagcggcagcgatgacctaggcgccaacgacgaactgatttccttcaaagacgagggcgaacaggaggagaagagctccgaaaactcctcggcagagagggatttagctgatgtcaaatcgtctctagtcaatgaatcagaaacgtaa

SEQ ID NO: 1830 - DNA, 573 bp, synthetic construct
  source 1..573: mol_type = other DNA; note = HA-RNF125-(GS)1-TCF4 nucleic acid
atgtacccatacgatgttccagattacgctggcagcggcagcggcagcggctccgtgctgagcaccgacagcggcaaatcggcgcccgcctctgccaccgcgcgggccctggagcgcaggagggacccggagttgcccgtcacgtccttcgactgcgccgtgtgccttgaggtgttacaccagcctgtccggacccgctgcggccacgtattctgccgttcctgtattgctaccagtctgaagaacaacaagtggacctgtccttattgccgggcatatcttccttcagaaggagttccagcaactgatgtagccaaaagaatgaaatcagagtataagaactgcgctgagtgtgacaccctggtttgcctcagtgaaatgagggcacatattcggacttgtcagaagtacatagataagtatggaccaggcagcgatgacctaggcgccaacgacgaactgatttccttcaaagacgagggcgaacaggaggagaagagctccgaaaactcctcggcagagagggatttagctgatgtcaaatcgtctctagtcaatgaatcagaaacgtaa

SEQ ID NO: 1831 - DNA, 579 bp, synthetic construct
  source 1..579: mol_type = other DNA; note = HA-RNF125-(GS)2-TCF4 nucleic acid
atgtacccatacgatgttccagattacgctggcagcggcagcggcagcggctccgtgctgagcaccgacagcggcaaatcggcgcccgcctctgccaccgcgcgggccctggagcgcaggagggacccggagttgcccgtcacgtccttcgactgcgccgtgtgccttgaggtgttacaccagcctgtccggacccgctgcggccacgtattctgccgttcctgtattgctaccagtctgaagaacaacaagtggacctgtccttattgccgggcatatcttccttcagaaggagttccagcaactgatgtagccaaaagaatgaaatcagagtataagaactgcgctgagtgtgacaccctggtttgcctcagtgaaatgagggcacatattcggacttgtcagaagtacatagataagtatggaccaggcagcggcagcgatgacctaggcgccaacgacgaactgatttccttcaaagacgagggcgaacaggaggagaagagctccgaaaactcctcggcagagagggatttagctgatgtcaaatcgtctctagtcaatgaatcagaaacgtaa

SEQ ID NO: 1832 - DNA, 585 bp, synthetic construct
  source 1..585: mol_type = other DNA; note = HA-RNF125-(GS)3-TCF4 nucleic acid
atgtacccatacgatgttccagattacgctggcagcggcagcggcagcggctccgtgctgagcaccgacagcggcaaatcggcgcccgcctctgccaccgcgcgggccctggagcgcaggagggacccggagttgcccgtcacgtccttcgactgcgccgtgtgccttgaggtgttacaccagcctgtccggacccgctgcggccacgtattctgccgttcctgtattgctaccagtctgaagaacaacaagtggacctgtccttattgccgggcatatcttccttcagaaggagttccagcaactgatgtagccaaaagaatgaaatcagagtataagaactgcgctgagtgtgacaccctggtttgcctcagtgaaatgagggcacatattcggacttgtcagaagtacatagataagtatggaccaggcagcggcagcggcagcgatgacctaggcgccaacgacgaactgatttccttcaaagacgagggcgaacaggaggagaagagctccgaaaactcctcggcagagagggatttagctgatgtcaaatcgtctctagtcaatgaatcagaaacgtaa

SEQ ID NO: 1833 - DNA, 591 bp, synthetic construct
  source 1..591: mol_type = other DNA; note = HA-RNF125-(GS)4-TCF4 nucleic acid
atgtacccatacgatgttccagattacgctggcagcggcagcggcagcggctccgtgctgagcaccgacagcggcaaatcggcgcccgcctctgccaccgcgcgggccctggagcgcaggagggacccggagttgcccgtcacgtccttcgactgcgccgtgtgccttgaggtgttacaccagcctgtccggacccgctgcggccacgtattctgccgttcctgtattgctaccagtctgaagaacaacaagtggacctgtccttattgccgggcatatcttccttcagaaggagttccagcaactgatgtagccaaaagaatgaaatcagagtataagaactgcgctgagtgtgacaccctggtttgcctcagtgaaatgagggcacatattcggacttgtcagaagtacatagataagtatggaccaggcagcggcagcggcagcggcagcgatgacctaggcgccaacgacgaactgatttccttcaaagacgagggcgaacaggaggagaagagctccgaaaactcctcggcagagagggatttagctgatgtcaaatcgtctctagtcaatgaatcagaaacgtaa

SEQ ID NO: 1834 - DNA, 597 bp, synthetic construct
  source 1..597: mol_type = other DNA; note = HA-RNF125-(GS)5-TCF4 nucleic acid
atgtacccatacgatgttccagattacgctggcagcggcagcggcagcggctccgtgctgagcaccgacagcggcaaatcggcgcccgcctctgccaccgcgcgggccctggagcgcaggagggacccggagttgcccgtcacgtccttcgactgcgccgtgtgccttgaggtgttacaccagcctgtccggacccgctgcggccacgtattctgccgttcctgtattgctaccagtctgaagaacaacaagtggacctgtccttattgccgggcatatcttccttcagaaggagttccagcaactgatgtagccaaaagaatgaaatcagagtataagaactgcgctgagtgtgacaccctggtttgcctcagtgaaatgagggcacatattcggacttgtcagaagtacatagataagtatggaccaggcagcggcagcggcagcggcagcggcagcgatgacctaggcgccaacgacgaactgatttccttcaaagacgagggcgaacaggaggagaagagctccgaaaactcctcggcagagagggatttagctgatgtcaaatcgtctctagtcaatgaatcagaaacgtaa

SEQ ID NO: 1835 - DNA, 603 bp, synthetic construct
  source 1..603: mol_type = other DNA; note = HA-RNF125-(GS)6-TCF4 nucleic acid
atgtacccatacgatgttccagattacgctggcagcggcagcggcagcggctccgtgctgagcaccgacagcggcaaatcggcgcccgcctctgccaccgcgcgggccctggagcgcaggagggacccggagttgcccgtcacgtccttcgactgcgccgtgtgccttgaggtgttacaccagcctgtccggacccgctgcggccacgtattctgccgttcctgtattgctaccagtctgaagaacaacaagtggacctgtccttattgccgggcatatcttccttcagaaggagttccagcaactgatgtagccaaaagaatgaaatcagagtataagaactgcgctgagtgtgacaccctggtttgcctcagtgaaatgagggcacatattcggacttgtcagaagtacatagataagtatggaccaggcagcggcagcggcagcggcagcggcagcggcagcgatgacctaggcgccaacgacgaactgatttccttcaaagacgagggcgaacaggaggagaagagctccgaaaactcctcggcagagagggatttagctgatgtcaaatcgtctctagtcaatgaatcagaaacgtaa

SEQ ID NO: 1836 - protein, 176 aa, synthetic construct; identical to SEQ ID NO: 29
  source 1..176: note = CHIP.1

SEQ ID NO: 1837 - protein, 35 aa, synthetic construct; identical to SEQ ID NO: 43
  source 1..35: note = DCAF1.1

SEQ ID NO: 1838 - protein, 356 aa, synthetic construct; identical to SEQ ID NO: 37
  source 1..356: note = E6AP.1

SEQ ID NO: 1839 - protein, 286 aa, synthetic construct; identical to SEQ ID NO: 40
  source 1..286: note = bTRCP.1

SEQ ID NO: 1840 - protein, 367 aa, synthetic construct; identical to SEQ ID NO: 38
  source 1..367: note = FBXW7a.1

SEQ ID NO: 1841 - protein, 367 aa, synthetic construct
  source 1..367: note = FBXW7a.2
NQELLSVGNKRRRTGGNLRGNPSSSQVDEEQMNRVVEEEQQQQLRQQEEEHTARNGEVVGVEPRPGGQNDSQQGQLEENNNRFISVDEDSSGNQEEQEEDEEHAGEQDEEDEEEEEMDQESDDFDQSDDSSREDEHTHTNSVTNSSSIVDLPVHQLSSPFYTKTTKMKRKLDHGNEVRSFSLGKKPCKVSEYTSTTGLVPCSANPTTFGDLRAANGQGQQRRRITSVQPPTGLQEWLKMFQSWSGPEKLLALDELIDSCEPTQVKHMMQVIEPQFQRDFISLLPKELALYVLSFLEPKDLLQAAQTCRYWRILAEDNLLWREKCKEEGIDEPLHIKRRKVIKPGFIHSPWKSAYIRQHRIDTNSRRG

SEQ ID NO: 1842 - protein, 367 aa, synthetic construct
  source 1..367: note = FBXW7a.3
NQELLSVGSKRRRTGGSLRGNPSSSQVDEEQMNRVVEEEQQQQLRQQEEEHTARNGEVVGVEPRPGGQNDSQQGQLEENNNRFISVDEDSSGNQEEQEEDEEHAGEQDEEDEEEEEMDQESDDFDQSDDSSREDEHTHTNSVTNSSSIVDLPVHQLSSPFYTKTTKMKRKLDHGSEVRSFSLGKKPCKVSEYTSTTGLVPCSATPTTFGDLRAANGQGQQRRRINNVQPPTGLQEWLKMFQSWSGPEKLLALDELIDSCEPTQVKHMMQVIEPQFQRDFISLLPKELALYVLSFLEPKDLLQAAQTCRYWRILAEDNLLWREKCKEEGIDEPLHIKRRKVIKPGFIHSPWKSAYIRQHRIDTNSRRG

SEQ ID NO: 1843 - protein, 367 aa, synthetic construct
  source 1..367: note = FBXW7a.4
NQELLSVGNKRRRTGGNLRGNPSSSQVDEEQMNRVVEEEQQQQLRQQEEEHTARNGEVVGVEPRPGGQNDSQQGQLEENNNRFISVDEDSSGNQEEQEEDEEHAGEQDEEDEEEEEMDQESDDFDQSDDSSREDEHTHTNSVTNSSSIVDLPVHQLSSPFYTKTTKMKRKLDHGNEVRSFSLGKKPCKVSEYTSTTGLVPCSANPTTFGDLRAANGQGQQRRRINNVQPPTGLQEWLKMFQSWSGPEKLLALDELIDSCEPTQVKHMMQVIEPQFQRDFISLLPKELALYVLSFLEPKDLLQAAQTCRYWRILAEDNLLWREKCKEEGIDEPLHIKRRKVIKPGFIHSPWKSAYIRQHRIDTNSRRG

SEQ ID NO: 1844 - protein, 202 aa, synthetic construct
  source 1..202: note = FBXW7a.5
KMKRKLDHGSEVRSFSLGKKPCKVSEYTSTTGLVPCSATPTTFGDLRAANGQGQQRRRITSVQPPTGLQEWLKMFQSWSGPEKLLALDELIDSCEPTQVKHMMQVIEPQFQRDFISLLPKELALYVLSFLEPKDLLQAAQTCRYWRILAEDNLLWREKCKEEGIDEPLHIKRRKVIKPGFIHSPWKSAYIRQHRIDTNSRRG

SEQ ID NO: 1845 - protein, 202 aa, synthetic construct
  source 1..202: note = FBXW7a.6
KMKRKLDHGNEVRSFSLGKKPCKVSEYTSTTGLVPCSANPTTFGDLRAANGQGQQRRRITSVQPPTGLQEWLKMFQSWSGPEKLLALDELIDSCEPTQVKHMMQVIEPQFQRDFISLLPKELALYVLSFLEPKDLLQAAQTCRYWRILAEDNLLWREKCKEEGIDEPLHIKRRKVIKPGFIHSPWKSAYIRQHRIDTNSRRG

SEQ ID NO: 1846 - protein, 202 aa, synthetic construct
  source 1..202: note = FBXW7a.7
KMKRKLDHGSEVRSFSLGKKPCKVSEYTSTTGLVPCSATPTTFGDLRAANGQGQQRRRINNVQPPTGLQEWLKMFQSWSGPEKLLALDELIDSCEPTQVKHMMQVIEPQFQRDFISLLPKELALYVLSFLEPKDLLQAAQTCRYWRILAEDNLLWREKCKEEGIDEPLHIKRRKVIKPGFIHSPWKSAYIRQHRIDTNSRRG

SEQ ID NO: 1847 - protein, 202 aa, synthetic construct
  source 1..202: note = FBXW7a.8
KMKRKLDHGNEVRSFSLGKKPCKVSEYTSTTGLVPCSANPTTFGDLRAANGQGQQRRRINNVQPPTGLQEWLKMFQSWSGPEKLLALDELIDSCEPTQVKHMMQVIEPQFQRDFISLLPKELALYVLSFLEPKDLLQAAQTCRYWRILAEDNLLWREKCKEEGIDEPLHIKRRKVIKPGFIHSPWKSAYIRQHRIDTNSRRG

SEQ ID NO: 1848 - protein, 106 aa, synthetic construct
  source 1..106: note = FBXW7a.9
TQVKHMMQVIEPQFQRDFISLLPKELALYVLSFLEPKDLLQAAQTCRYWRILAEDNLLWREKCKEEGIDEPLHIKRRKVIKPGFIHSPWKSAYIRQHRIDTNSRRG

SEQ ID NO: 1849 - protein, 287 aa, synthetic construct; identical to SEQ ID NO: 39
  source 1..287: note = FBXW7b.1

SEQ ID NO: 1850 - protein, 287 aa, synthetic construct
  source 1..287: note = FBXW7b.2
CVPRSGLILSCICLYCGVLLPVLLPNLPFLTCLSMSTLESVTYLPEKGLYCQRLPSSRTHGGTESLKGKNTENMGFYGTLKMIFYKMKRKLDHGNEVRSFSLGKKPCKVSEYTSTTGLVPCSANPTTFGDLRAANGQGQQRRRITSVQPPTGLQEWLKMFQSWSGPEKLLALDELIDSCEPTQVKHMMQVIEPQFQRDFISLLPKELALYVLSFLEPKDLLQAAQTCRYWRILAEDNLLWREKCKEEGIDEPLHIKRRKVIKPGFIHSPWKSAYIRQHRIDTNSRRG

SEQ ID NO: 1851 - protein, 287 aa, synthetic construct
  source 1..287: note = FBXW7b.3
CVPRSGLILSCICLYCGVLLPVLLPNLPFLTCLSMSTLESVTYLPEKGLYCQRLPSSRTHGGTESLKGKNTENMGFYGTLKMIFYKMKRKLDHGSEVRSFSLGKKPCKVSEYTSTTGLVPCSATPTTFGDLRAANGQGQQRRRINNVQPPTGLQEWLKMFQSWSGPEKLLALDELIDSCEPTQVKHMMQVIEPQFQRDFISLLPKELALYVLSFLEPKDLLQAAQTCRYWRILAEDNLLWREKCKEEGIDEPLHIKRRKVIKPGFIHSPWKSAYIRQHRIDTNSRRG

SEQ ID NO: 1852 - protein, 287 aa, synthetic construct
  source 1..287: note = FBXW7b.4
CVPRSGLILSCICLYCGVLLPVLLPNLPFLTCLSMSTLESVTYLPEKGLYCQRLPSSRTHGGTESLKGKNTENMGFYGTLKMIFYKMKRKLDHGNEVRSFSLGKKPCKVSEYTSTTGLVPCSANPTTFGDLRAANGQGQQRRRINNVQPPTGLQEWLKMFQSWSGPEKLLALDELIDSCEPTQVKHMMQVIEPQFQRDFISLLPKELALYVLSFLEPKDLLQAAQTCRYWRILAEDNLLWREKCKEEGIDEPLHIKRRKVIKPGFIHSPWKSAYIRQHRIDTNSRRG

SEQ ID NO: 1853 - protein, 321 aa, synthetic construct; identical to SEQ ID NO: 41
  source 1..321: note = Keap1.1

SEQ ID NO: 1854 - protein, 228 aa, synthetic construct; identical to SEQ ID NO: 42
  source 1..228: note = SPOP.1

SEQ ID NO: 1855 - protein, 208 aa, synthetic construct
  source 1..208: note = SPOP.2
SVNISGQNTMNMVKVPECRLADELGGLWENSRFTDCCLCVAGQEFQAHKAILAARSPVFSAMFEHEMEESKKNRVEINDVEPEVFKEMMCFIYTGKAPNLDKMADDLLAAADKYALERLKVMCEDALCSNLSVENAAEILILADLHSADQLKTQAVDFINYHASDVLETSGWKSMVVSHPHLVAEAYRSLASAQCPFLGPPRKRLKQS

SEQ ID NO: 1856 - protein, 194 aa, synthetic construct
  source 1..194: note = SPOP.3
SVNISGQNTMNMVKVPECRLADELGGLWENSRFTDCCLCVAGQEFQAHKAILAARSPVFSAMFEHEMEESKKNRVEINDVEPEVFKEMMCFIYTGKAPNLDKMADDLLAAADKYALERLKVMCEDALCSNLSVENAAEILILADLHSADQLKTQAVDFINYHASDVLETSGWKSMVVSHPHLVAEAYRSLASAQ

SEQ ID NO: 1857 - protein, 42 aa, synthetic construct
  source 1..42: note = VIF.1
SESAIRNTILGRIVSPRCEYQAGHNKVGSLQYLALAALIKPK

SEQ ID NO: 1858 - protein, 92 aa, synthetic construct; identical to SEQ ID NO: 34
  source 1..92: note = NHLRC1.1

SEQ ID NO: 1859 - protein, 90 aa, synthetic construct
  source 1..90: note = NHLRC1.2
GPALHELMREAEISLLECKVCFEKFGHRQQRRPRNLSCGHVVCLACVAALAHPRTLALECPFCRRACRGCDTSDCLPVLHLIELLGSALR

SEQ ID NO: 1860 - protein, 90 aa, synthetic construct
  source 1..90: note = NHLRC1.3
GPALHELMREAEISLLESKVCFEKFGHRQQRRPRNLSCGHVVCLACVAALAHPRTLALECPFCRRACRGCDTSDCLPVLHLIELLGSALR

SEQ ID NO: 1861 - protein, 106 aa, synthetic construct
  source 1..106: note = NHLRC1.4
ESGPALHELMREAEISLLECKVCFEKFGHRQQRRPRNLSCGHVVCLACVAALAHPRTLALECPFCRRACRGCDTSDCLPVLHLIELLGSALRQSPAAHRAAPSAPG

SEQ ID NO: 1862 - protein, 88 aa, synthetic construct
  source 1..88: note = NHLRC1.5
ALHELMREAEISLLECKVCFEKFGHRQQRRPRNLSCGHVVCLACVAALAHPRTLALECPFCRRACRGCDTSDCLPVLHLIELLGSALR

SEQ ID NO: 1863 - protein, 54 aa, synthetic construct
  source 1..54: note = RNF11.1
RECVICMMDFVYGDPIRFLPCMHIYHLDCIDDWLMRSFTCPSCMEPVDAALLSS

SEQ ID NO: 1864 - protein, 61 aa, synthetic construct
  source 1..61: note = RNF111.1
TEEDTEEKCTICLSILEEGEDVRRLPCMHLFHQVCVDQWLITNKKCPICRVDIEAQLPSES

SEQ ID NO: 1865 - protein, 95 aa, synthetic construct; identical to SEQ ID NO: 30
  source 1..95: note = RNF114.1

SEQ ID NO: 1866 - protein, 45 aa, synthetic construct
  source 1..45: note = RNF115.1
LECPVCKEDYTVEEEVRQLPCNHFFHSSCIVPWLELHDTCPVCRK

SEQ ID NO: 1867 - protein, 69 aa, synthetic construct
  source 1..69: note = RNF12.1
GLTKEQIDNLAMRSFGENDALKTCSVCITEYTEGNKLRKLPCSHEYHVHCIDRWLSENSTCPICRRAVL

SEQ ID NO: 1868 - protein, 78 aa, synthetic construct
  source 1..78: note = RNF12.2
GLTKEQIDNLAMRSFGENDALKTCSVCITEYTEGNKLRKLPCSHEYHVHCIDRWLSENSTCPICRRAVLASGNRESVV

SEQ ID NO: 1869 - protein, 125 aa, synthetic construct
  source 1..125: note = RNF125.1
VLSTDSGKSAPASATARALERRRDPELPVTSFDCAVCLEVLHQPVRTRCGHVFCRSCIATSLKNNKWTCPYCRAYLPSEGVPATDVAKRMKSEYKNCAECDTLVCLSEMRAHIRTCQKYIDKYGP

SEQ ID NO: 1870 - protein, 96 aa, synthetic construct
  source 1..96: note = RNF125.2
TSFDCAVCLEVLHQPVRTRCGHVFCRSCIATSLKNNKWTCPYCRAYLPSEGVPATDVAKRMKSEYKNCAECDTLVCLSEMRAHIRTCQKYIDKYGP

SEQ ID NO: 1871 - protein, 94 aa, synthetic construct
  source 1..94: note = RNF125.3
FDCAVCLEVLHQPVRTRCGHVFCRSCIATSLKNNKWTCPYCRAYLPSEGVPATDVAKRMKSEYKNCAECDTLVCLSEMRAHIRTCQKYIDKYGP

SEQ ID NO: 1872 - protein, 96 aa, synthetic construct
  source 1..96: note = RNF125.4
TSFDCAVCLEVLHQPVRTRCGHVFCRSCIATSLKNNKWTCPYCRAYLPSEGVPATDVARRMKSEYKNCAECDTLVCLSEMRAHIRTCQRYIDKYGP

SEQ ID NO: 1873 - protein, 96 aa, synthetic construct
  source 1..96: note = RNF125.5
TSFDCAVCLEVLHQPVRTRCGHVFCRSCIATSLKNNKWTCPYCRAYLPSEGVPATDVAKRMKNENKNCAECDTLVCLNEMRAHIRTCQKYIDKYGP

SEQ ID NO: 1874 - protein, 96 aa, synthetic construct
  source 1..96: note = RNF125.6
TSFDCAVCLEVLHQPVRTRCGHVFCRSCIATSLKNNKWTCPYCRAYLPSEGVPATDVARRMKNENKNCAECDTLVCLNEMRAHIRTCQRYIDKYGP

SEQ ID NO: 1875 - protein, 96 aa, synthetic construct
  source 1..96: note = RNF125.7
TSFDCAVCLEVLHQPVRTRCGHVFCRSCIATSLKNNKWTAPYARAYLPSEGVPATDVAKRMKSEYKNCAECDTLVCLSEMRAHIRTCQKYIDKYGP

SEQ ID NO: 1876 - protein, 52 aa, synthetic construct
  source 1..52: note = RNF128.1
DSCAVCIELYKPNDLVRILTCNHIFHKTCVDPWLLEHRTCPMCKCDILKALG

SEQ ID NO: 1877 - protein, 100 aa, synthetic construct; identical to SEQ ID NO: 32
  source 1..100: note = RNF138.1

SEQ ID NO: 1878 - protein, 45 aa, synthetic construct
  source 1..45: note = RNF149.1
ENCAVCIENFKVKDIIRILPCKHIFHRICIDPWLLDHRTCPMCKL

SEQ ID NO: 1879 - protein, 47 aa, synthetic construct
  source 1..47: note = RNF152.1
LLECQICFNYYSPRRRPKLLDCKHTCCSVCLQQMRTSQKDVRCPWCR

SEQ ID NO: 1880 - protein, 81 aa, synthetic construct
  source 1..81: note = RNF165.1
NTIERFTFPHKYKKRRPQDGKGKKDEGEESDTDEKCTICLSMLEDGEDVRRLPCMHLFHQLCVDQWLAMSKKCPICRVDIE

SEQ ID NO: 1881 - protein, 101 aa, synthetic construct; identical to SEQ ID NO: 33
  source 1..101: note = RNF166.1

SEQ ID NO: 1882 - protein, 56 aa, synthetic construct
  source 1..56: note = RNF182.1
ECKICYNRYNLKQRKPKVLECCHRVCAKCLYKIIDFGDSPQGVIVCPFCRFETCLP

SEQ ID NO: 1883 - protein, 76 aa, synthetic construct
  source 1..76: note = RNF182.2
ELECKICYNRYNLKQRKPKVLECCHRVCAKCLYKIIDFGDSPQGVIVCPFCRFETCLPDDEVSSLPDDNNILVNLT

SEQ ID NO: 1884 - protein, 70 aa, synthetic construct
  source 1..70: note = RNF20.1
DEILMEEIKDYKARLTCPCCNMRKKDAVLTKCFHVFCFECVKTRYDTRQRKCPKCNAAFGANDFHRIYIG

SEQ ID NO: 1885 - protein, 126 aa, synthetic construct
  source 1..126: note = RNF25.1
NIPHGQCVICLYGFQEKEAFTKTPCYHYFHCHCLARYIQHMEQELKAQGQEQEQERQHATTKQKAVGVQCPVCREPLVYDLASLKAAPEPQQPMELYQPSAESLRQQEERKRLYQRQQERGGIIDL

SEQ ID NO: 1886 - protein, 61 aa, synthetic construct
  source 1..61: note = RNF4.1
VSCPICMDGYSEIVQNGRLIVSTECGHVFCSQCLRDSLKNANTCPTCRKKINHKRYHPIYI

SEQ ID NO: 1887 - protein, 69 aa, synthetic construct
  source 1..69: note = RNF6.1
EQIDNLSTRHYEHNSIDSELGKICSVCISDYVTGNKLRQLPCMHEFHIHCIDRWLSENCTCPICRQPVL

SEQ ID NO: 1888 - protein, 77 aa, synthetic construct
  source 1..77: note = RNF6.2
EQIDNLSTRHYEHNSIDSELGKICSVCISDYVTGNKLRQLPCMHEFHIHCIDRWLSENCTCPICRQPVLGSNIANNG

SEQ ID NO: 1889 - protein, 276 aa, synthetic construct
  source 1..276: note = TRIM21.1
ASAARLTMMWEEVTCPICLDPFVEPVSIECGHSFCQECISQVGKGGGSVCPVCRQRFLLKNLRPNRQLANMVNNLKEISQEAREGTQGERCAVHGERLHLFCEKDGKALCWVCAQSRKHRDHAMVPLEEAAQEYQEKLQVALGELRRKQELAEKLEVEIAIKRADWKKTVETQKSRIHAEFVQQKNFLVEEEQRQLQELEKDEREQLRILGEKEAKLAQQSQALQELISELDRRCHSSALELLQEVIIVLERSESWNLKDLDITSPELRSVCHVPG

SEQ ID NO: 1890 - protein, 128 aa, synthetic construct
  source 1..128: note = TRIM21.2
ASAARLTMMWEEVTCPICLDPFVEPVSIECGHSFCQECISQVGKGGGSVCPVCRQRFLLKNLRPNRQLANMVNNLKEISQEAREGTQGERCAVHGERLHLFCEKDGKALCWVCAQSRKHRDHAMVPLE

SEQ ID NO: 1891 - protein, 83 aa, synthetic construct
  source 1..83: note = TRIM21.3
ASAARLTMMWEEVTCPICLDPFVEPVSIECGHSFCQECISQVGKGGGSVCPVCRQRFLLKNLRPNRQLANMVNNLKEISQEAR

SEQ ID NO: 1892 - protein, 90 aa, synthetic construct
  source 1..90: note = TRIM32.1
SHLNLDALREVLECPICMESFTEEQLRPKLLHCGHTICRQCLEKLLASSINGVRCPFCSKITRITSLTQLTDNLTVLKIIDTAGLSEAVG

SEQ ID NO: 1893 - protein, 86 aa, synthetic construct
  source 1..86: note = ZNRF1.1
GFKCPICSKSVASDEMEMHFIMCLSKPRLSYNDDVLTKDAGECVICLEELLQGDTIARLPCLCIYHKSCIDSWFEVNRSCPEHPAD

SEQ ID NO: 1894 - protein, 48 aa, synthetic construct
  source 1..48: note = ZNRF4.1
DLCAICLDEYEEGDQLKILPCSHTYHCKCIDPWFSQAPRRSCPVCKQS

SEQ ID NO: 1895 - protein, 79 aa, synthetic construct; identical to SEQ ID NO: 35
  source 1..79: note = CBLb.1

SEQ ID NO: 1896 - protein, 10 aa, synthetic construct
  source 1..10: note = spNLS.2
GPPRKRLKQS

SEQ ID NO: 1897 - protein, 13 aa, synthetic construct
  source 1..13: note = spNLS
PFLGPPRKRLKQS

SEQ ID NO: 1898 - protein, 27 aa, synthetic construct
  source 1..27: note = hrpNLS
RSGGNHRRNGRGGRGGYNRRNNGYHPY

SEQ ID NO: 1899 - protein, 21 aa, synthetic construct
  source 1..21: note = bpNLS
GKRKLITSEEERSPAKRGRKS

SEQ ID NO: 1900 - protein, 20 aa, synthetic construct
  source 1..20: note = nlpNLS
AVKRPAATKKAGQAKKKKLD

SEQ ID NO: 1901 - protein, 21 aa, synthetic construct
  source 1..21: note = 3x(svNLS)
PKKKRKVPKKKRKVPKKKRKV

SEQ ID NO: 1902 - protein, 27 aa, synthetic construct
  source 1..27: note = 3x(mycNLS)
PAAKRVKLDPAAKRVKLDPAAKRVKLD

SEQ ID NO: 1903 - protein, 7 aa, synthetic construct
  source 1..7: note = svNLS
PKKKRKV

SEQ ID NO: 1904 - protein, 9 aa, synthetic construct
  source 1..9: note = mycNLS
PAAKRVKLD

SEQ ID NO: 1905 - protein, 9 aa, synthetic construct
  source 1..9: note = CHIP.NLS
RIAKKKRWN

SEQ ID NO: 1906 - protein, 9 aa, synthetic construct
  source 1..9: note = SPOP.NLS
PPRKRLKQS

SEQ ID NO: 1907 - protein, 18 aa, synthetic construct
  source 1..18: note = RNF165.NLS
PHKYKKRRPQDGKGKKDE

SEQ ID NO: 1908 - protein, 5 aa, synthetic construct
  source 1..5: note = FBXW7a.NLS
KRRRT

SEQ ID NO: 1909 - protein, 7 aa, synthetic construct
  source 1..7: note = NHLRC1.NLS
RQQRRPR

SEQ ID NO: 1910 - protein, 15 aa, synthetic construct
  source 1..15: note = NHLRC1.NES
CDTSDCLPVLHLIEL

SEQ ID NO: 1911 - protein, 15 aa, synthetic construct
  source 1..15: note = E6AP.NES
EGQFTLIGIVLGLAI

SEQ ID NO: 1912 - protein, 15 aa, synthetic construct
  source 1..15: note = Keap1.NES
RCKDYLVKIFEELTL

SEQ ID NO: 1913 - protein, 12 aa, synthetic construct
  source 1..12: note = RNF12.NES
GLTKEQIDNLAM

SEQ ID NO: 1914 - protein, 15 aa, synthetic construct
  source 1..15: note = RNF138.NES
CPERALDLENIMRKF

SEQ ID NO: 1915 - protein, 15 aa, synthetic construct
  source 1..15: note = RNF166.NES
GCNKKVTLAKMRVHI

SEQ ID NO: 1916 - protein, 15 aa, synthetic construct
  source 1..15: note = TRIM21.NES
RCHSSALELLQEVII

SEQ ID NO: 1917 - protein, 18 aa, synthetic construct
  source 1..18: note = TRIM32.NES
TRITSLTQLTDNLTVLKI

SEQ ID NO: 1918 - protein, 124 aa, synthetic construct
  source 1..124: note = mycV.0300 full
EVQLLESGGGLVQPGGSLRLSAAASGFTFADTDMGWFRQAPGKEREGVSAISGSGGNTYYADSVKGRFTISRDNSKNTLYLQMNSLRAEDTAVYYAAALGDYGDAIDYSEADYWGQGTQVTVSS

SEQ ID NO: 1919 - protein, 26 aa, synthetic construct
  source 1..26: note = mycV.0300 VH FR1
EVQLLESGGGLVQPGGSLRLSAAASG

SEQ ID NO: 1920 - protein, 9 aa, synthetic construct
  source 1..9: note = mycV.0300 VH CDR1
FTFADTDMG

SEQ ID NO: 1921 - protein, 14 aa, synthetic construct
  source 1..14: note = mycV.0300 VH FR2
WFRQAPGKEREGVS

SEQ ID NO: 1922 - protein, 17 aa, synthetic construct
  source 1..17: note = mycV.0300 VH CDR2
AISGSGGNTYYADSVKG

SEQ ID NO: 1923 - protein, 30 aa, synthetic construct
  source 1..30: note = mycV.0300 VH FR3
RFTISRDNSKNTLYLQMNSLRAEDTAVYYA

SEQ ID NO: 1924 - protein, 17 aa, synthetic construct
  source 1..17: note = mycV.0300 VH CDR3
AALGDYGDAIDYSEADY

SEQ ID NO: 1925 - protein, 11 aa, synthetic construct
  source 1..11: note = mycV.0300 VH FR4
WGQGTQVTVSS

SEQ ID NO: 1926 - protein, 122 aa, synthetic construct
  source 1..122: note = mycV.1300 full
EVQLLESGGGLVQPGGSLRLSAAASGFTFGDADMGWFRQAPGKEREGVSAISASGDSTYYADSVKGRFTISRDNSKNTLYLQMNSLRAEDTAVYYAAHLDQELTGASEHDYWGRGTQVTVSS

SEQ ID NO: 1927 - protein, 26 aa, synthetic construct
  source 1..26: note = mycV.1300 VH FR1
EVQLLESGGGLVQPGGSLRLSAAASG

SEQ ID NO: 1928 - protein, 9 aa, synthetic construct
  source 1..9: note = mycV.1300 VH CDR1
FTFGDADMG

SEQ ID NO: 1929 - protein, 14 aa, synthetic construct
  source 1..14: note = mycV.1300 VH FR2
WFRQAPGKEREGVS

SEQ ID NO: 1930 - protein, 17 aa, synthetic construct
  source 1..17: note = mycV.1300 VH CDR2
AISASGDSTYYADSVKG

SEQ ID NO: 1931 - protein, 30 aa, synthetic construct; identical to SEQ ID NO: 1923
  source 1..30: note = mycV.1300 VH FR3

SEQ ID NO: 1932 - protein, 15 aa, synthetic construct
  source 1..15: note = mycV.1300 VH CDR3
AHLDQELTGASEHDY

SEQ ID NO: 1933 - protein, 11 aa, synthetic construct
  source 1..11: note = mycV.1300 VH FR4
WGRGTQVTVSS

SEQ ID NO: 1934 - protein, 124 aa, synthetic construct
  source 1..124: note = mycV.1500 full
EVQLLESGGGLVQPGGSLRLSAAASGFTFADTDMGWFRQAPGKEREGVSAISGSGGSTYYADSVKGRFTISRDNSKNTLYLQMNSLRAEDTAVYYVAIIDDILTGGTFDEGDYWGRGTQVTVSS

SEQ ID NO: 1935 - protein, 26 aa, synthetic construct
  source 1..26: note = mycV.1500 VH FR1
EVQLLESGGGLVQPGGSLRLSAAASG

SEQ ID NO: 1936 - protein, 9 aa, synthetic construct
  source 1..9: note = mycV.1500 VH CDR1
FTFADTDMG

SEQ ID NO: 1937 - protein, 14 aa, synthetic construct
  source 1..14: note = mycV.1500 VH FR2
WFRQAPGKEREGVS

SEQ ID NO: 1938 - protein, 17 aa, synthetic construct
  source 1..17: note = mycV.1500 VH CDR2
AISGSGGSTYYADSVKG

SEQ ID NO: 1939 - protein, 30 aa, synthetic construct
  source 1..30: note = mycV.1500 VH FR3
RFTISRDNSKNTLYLQMNSLRAEDTAVYYV

SEQ ID NO: 1940 - protein, 17 aa, synthetic construct
  source 1..17: note = mycV.1500 VH CDR3
AIIDDILTGGTFDEGDY

SEQ ID NO: 1941 - protein, 11 aa, synthetic construct
  source 1..11: note = mycV.1500 VH FR4
WGRGTQVTVSS

SEQ ID NO: 1942 - protein, 121 aa, synthetic construct
  source 1..121: note = mycV.3700 full
EVQLLESGGGLVQPGGSLRLSAAASGFTFDVSDMGWFRQAPGKEREGVSAIGTEGDTYYADSVKGRFTISRDNSKNTLYLQMNSLRAEDTAVYYAAILPGELSLGNEYDYWGQGTQVTVSS

SEQ ID NO: 1943 - protein, 26 aa, synthetic construct
  source 1..26: note = mycV.3700 VH FR1
EVQLLESGGGLVQPGGSLRLSAAASG

SEQ ID NO: 1944 - protein, 9 aa, synthetic construct
  source 1..9: note = mycV.3700 VH CDR1
FTFDVSDMG

SEQ ID NO: 1945 - protein, 14 aa, synthetic construct
  source 1..14: note = mycV.3700 VH FR2
WFRQAPGKEREGVS

SEQ ID NO: 1946 - protein, 16 aa, synthetic construct
  source 1..16: note = mycV.3700 VH CDR2
AIGTEGDTYYADSVKG

SEQ ID NO: 1947 - protein, 30 aa, synthetic construct; identical to SEQ ID NO: 1923
  source 1..30: note = mycV.3700 VH FR3

SEQ ID NO: 1948 - protein, 15 aa, synthetic construct
  source 1..15: note = mycV.3700 VH CDR3
AILPGELSLGNEYDY

SEQ ID NO: 1949 - protein, 11 aa, synthetic construct
  source 1..11: note = mycV.3700 VH FR4
WGQGTQVTVSS

SEQ ID NO: 1950 - protein, 124 aa, synthetic construct
  source 1..124: note = mycV.6600 full
EVQLLESGGGLVQPGGSLRLSCAASGFTFSSYAMSWFRQAPGKEREGVSAISGSGGSTYYADSVKGRFTISRDNSKNTLYLQMNSLRAEDTAVYYCATLDEYSGFGGASEADYWGQGTQVTVSS

SEQ ID NO: 1951 - protein, 26 aa, synthetic construct
  source 1..26: note = mycV.6600 VH FR1
EVQLLESGGGLVQPGGSLRLSCAASG

SEQ ID NO: 1952 - protein, 9 aa, synthetic construct
  source 1..9: note = mycV.6600 VH CDR1
FTFSSYAMS

SEQ ID NO: 1953 - protein, 14 aa, synthetic construct
  source 1..14: note = mycV.6600 VH FR2
WFRQAPGKEREGVS

SEQ ID NO: 1954 - protein, 17 aa, synthetic construct
  source 1..17: note = mycV.6600 VH CDR2
AISGSGGSTYYADSVKG

SEQ ID NO: 1955 - protein, 30 aa, synthetic construct
  source 1..30: note = mycV.6600 VH FR3
RFTISRDNSKNTLYLQMNSLRAEDTAVYYC

SEQ ID NO: 1956 - protein, 17 aa, synthetic construct
  source 1..17: note = mycV.6600 VH CDR3
ATLDEYSGFGGASEADY

SEQ ID NO: 1957 - protein, 11 aa, synthetic construct
  source 1..11: note = mycV.6600 VH FR4
WGQGTQVTVSS

SEQ ID NO: 1958 - protein, 124 aa, synthetic construct
  source 1..124: note = mycV.1516 full
EVQLLESGGGLVQPGGSLRLSVAASGFTFADTDMGWFRQAPGKEREGVSAISGSGGSTYYADSVKGRFTISRDNSKNTLYLQMNSLRAEDTAVYYAAIIDDILTGGTFDEGDYWGRGTQVTVSS

SEQ ID NO: 1959 - protein, 26 aa, synthetic construct
  source 1..26: note = mycV.1516 VH FR1
EVQLLESGGGLVQPGGSLRLSAAASG

SEQ ID NO: 1960 - protein, 9 aa, synthetic construct
  source 1..9: note = mycV.1516 VH CDR1
FTFADTDMG

SEQ ID NO: 1961 - protein, 14 aa, synthetic construct
  source 1..14: note = mycV.1516 VH FR2
WFRQAPGKEREGVS

SEQ ID NO: 1962 - protein, 17 aa, synthetic construct
  source 1..17: note = mycV.1516 VH CDR2
AISGSGGSTYYADSVKG

SEQ ID NO: 1963 - protein, 30 aa, synthetic construct; identical to SEQ ID NO: 1939
  source 1..30: note = mycV.1516 VH FR3

SEQ ID NO: 1964 - protein, 17 aa, synthetic construct
  source 1..17: note = mycV.1516 VH CDR3
AIIDDILTGGTFDEGDY

SEQ ID NO: 1965 - protein, 11 aa, synthetic construct
  source 1..11: note = mycV.1516 VH FR4
WGRGTQVTVSS

SEQ ID NO: 1966 - protein, 124 aa, synthetic construct
  source 1..124: note = mycV.1515 full
EVQLLESGGGLVQPGGSLRLSAAASGFTFADTDMGWFRQAPGKEREGVSAISGSGGSTYYADSVKGRFTISRDNSKNTLYLQMNSLRAEDTAVYYAAIIDDILTGGTFDEGDYWGRGTQVTVSS

SEQ ID NO: 1967 - protein, 26 aa, synthetic construct
  source 1..26: note = mycV.1515 VH FR1
EVQLLESGGGLVQPGGSLRLSAAASG

SEQ ID NO: 1968 - protein, 9 aa, synthetic construct
  source 1..9: note = mycV.1515 VH CDR1
FTFADTDMG

SEQ ID NO: 1969 - protein, 14 aa, synthetic construct
  source 1..14: note = mycV.1515 VH FR2
WFRQAPGKEREGVS

SEQ ID NO: 1970 - protein, 17 aa, synthetic construct
  source 1..17: note = mycV.1515 VH CDR2
AISGSGGSTYYADSVKG

SEQ ID NO: 1971 - protein, 30 aa, synthetic construct; identical to SEQ ID NO: 1939
  source 1..30: note = mycV.1515 VH FR3

SEQ ID NO: 1972 - protein, 17 aa, synthetic construct
  source 1..17: note = mycV.1515 VH CDR3
AIIDDILTGGTFDEGDY

SEQ ID NO: 1973 - protein, 11 aa, synthetic construct
  source 1..11: note = mycV.1515 VH FR4
WGRGTQVTVSS

SEQ ID NO: 1974 - protein, 124 aa, synthetic construct
  source 1..124: note = mycV.1514 full
EVQLLESGGGLVQPGGSLRLSVAASGFTFADTDMGWFRQAPGKEREGVSAISGSGGSTYYADSVKGRFTISRDNSKNTLYLQMNSLRAEDTAVYYVAIIDDILTGGTFDEGDYWGRGTQVTVSS

SEQ ID NO: 1975 - protein, 26 aa, synthetic construct
  source 1..26: note = mycV.1514 VH FR1
EVQLLESGGGLVQPGGSLRLSAAASG

SEQ ID NO: 1976 - protein, 9 aa, synthetic construct
  source 1..9: note = mycV.1514 VH CDR1
FTFADTDMG

SEQ ID NO: 1977 - protein, 14 aa, synthetic construct
  source 1..14: note = mycV.1514 VH FR2
WFRQAPGKEREGVS

SEQ ID NO: 1978 - protein, 17 aa, synthetic construct
  source 1..17: note = mycV.1514 VH CDR2
AISGSGGSTYYADSVKG

SEQ ID NO: 1979 - protein, 30 aa, synthetic construct; identical to SEQ ID NO: 1939
  source 1..30: note = mycV.1514 VH FR3

SEQ ID NO: 1980 - protein, 17 aa, synthetic construct
  source 1..17: note = mycV.1514 VH CDR3
AIIDDILTGGTFDEGDY

SEQ ID NO: 1981 - protein, 11 aa, synthetic construct
  source 1..11: note = mycV.1514 VH FR4
WGRGTQVTVSS

SEQ ID NO: 1982 - protein, 124 aa, synthetic construct
  source 1..124: note = mycV.1513 full
EVQLLESGGGLVQPGGSLRLSVAASGFTFADTDMGWFRQAPGKEREGVSAISGSGGSTYYADSVKGRFTISRDNSKNTLYLQMNSLRAEDTAVYYCAIIDDILTGGTFDEGDYWGRGTQVTVSS

SEQ ID NO: 1983 - protein, 26 aa, synthetic construct
  source 1..26: note = mycV.1513 VH FR1
EVQLLESGGGLVQPGGSLRLSAAASG

SEQ ID NO: 1984 - protein, 9 aa, synthetic construct
  source 1..9: note = mycV.1513 VH CDR1
FTFADTDMG

SEQ ID NO: 1985 - protein, 14 aa, synthetic construct
  source 1..14: note = mycV.1513 VH FR2
WFRQAPGKEREGVS

SEQ ID NO: 1986 - protein, 17 aa, synthetic construct
  source 1..17: note = mycV.1513 VH CDR2
AISGSGGSTYYADSVKG

SEQ ID NO: 1987 - protein, 30 aa, synthetic construct; identical to SEQ ID NO: 1939
  source 1..30: note = mycV.1513 VH FR3

SEQ ID NO: 1988 - protein, 17 aa, synthetic construct
  source 1..17: note = mycV.1513 VH CDR3
AIIDDILTGGTFDEGDY

SEQ ID NO: 1989 - protein, 11 aa, synthetic construct
  source 1..11: note = mycV.1513 VH FR4
WGRGTQVTVSS

SEQ ID NO: 1990 - protein, 124 aa, synthetic construct
  source 1..124: note = mycV.1512 full
EVQLLESGGGLVQPGGSLRLSCAASGFTFADTDMGWFRQAPGKEREGVSAISGSGGSTYYADSVKGRFTISRDNSKNTLYLQMNSLRAEDTAVYYAAIIDDILTGGTFDEGDYWGRGTQVTVSS

SEQ ID NO: 1991 - protein, 26 aa, synthetic construct
  source 1..26: note = mycV.1512 VH FR1
EVQLLESGGGLVQPGGSLRLSAAASG

SEQ ID NO: 1992 - protein, 9 aa, synthetic construct
  source 1..9: note = mycV.1512 VH CDR1
FTFADTDMG

SEQ ID NO: 1993 - protein, 14 aa, synthetic construct
  source 1..14: note = mycV.1512 VH FR2
WFRQAPGKEREGVS

SEQ ID NO: 1994 - protein, 17 aa, synthetic construct
  source 1..17: note = mycV.1512 VH CDR2
AISGSGGSTYYADSVKG

SEQ ID NO: 1995 - protein, 30 aa, synthetic construct; identical to SEQ ID NO: 1939
  source 1..30: note = mycV.1512 VH FR3

SEQ ID NO: 1996 - protein, 17 aa, synthetic construct
  source 1..17: note = mycV.1512 VH CDR3
AIIDDILTGGTFDEGDY

SEQ ID NO: 1997 - protein, 11 aa, synthetic construct
  source 1..11: note = mycV.1512 VH FR4
WGRGTQVTVSS

SEQ ID NO: 1998 - protein, 124 aa, synthetic construct
  source 1..124: note = mycV.1511 full
EVQLLESGGGLVQPGGSLRLSAAASGFTFADTDMGWFRQAPGKEREGVSAISGSGGSTYYADSVKGRFTISRDNSKNTLYLQMNSLRAEDTAVYYCAIIDDILTGGTFDEGDYWGRGTQVTVSS

SEQ ID NO: 1999 - protein, 26 aa, synthetic construct
  source 1..26: note = mycV.1511 VH FR1
EVQLLESGGGLVQPGGSLRLSAAASG

SEQ ID NO: 2000 - protein, 9 aa, synthetic construct
  source 1..9: note = mycV.1511 VH CDR1
FTFADTDMG

SEQ ID NO: 2001 - protein, 14 aa, synthetic construct
  source 1..14: note = mycV.1511 VH FR2
WFRQAPGKEREGVS

SEQ ID NO: 2002 - protein, 17 aa, synthetic construct
  source 1..17: note = mycV.1511 VH CDR2
AISGSGGSTYYADSVKG

SEQ ID NO: 2003 - protein, 30 aa, synthetic construct; identical to SEQ ID NO: 1939
  source 1..30: note = mycV.1511 VH FR3

SEQ ID NO: 2004 - protein, 17 aa, synthetic construct
  source 1..17: note = mycV.1511 VH CDR3
AIIDDILTGGTFDEGDY

SEQ ID NO: 2005 - protein, 11 aa, synthetic construct
  source 1..11: note = mycV.1511 VH FR4
WGRGTQVTVSS

SEQ ID NO: 2006 - protein, 124 aa, synthetic construct
  source 1..124: note = mycV.1510 full
EVQLLESGGGLVQPGGSLRLSCAASGFTFADTDMGWFRQAPGKEREGVSAISGSGGSTYYADSVKGRFTISRDNSKNTLYLQMNSLRAEDTAVYYVAIIDDILTGGTFDEGDYWGRGTQVTVSS

SEQ ID NO: 2007 - protein, 26 aa, synthetic construct
  source 1..26: note = mycV.1510 VH FR1
EVQLLESGGGLVQPGGSLRLSAAASG

SEQ ID NO: 2008 - protein, 9 aa, synthetic construct
  source 1..9: note = mycV.1510 VH CDR1
FTFADTDMG

SEQ ID NO: 2009 - protein, 14 aa, synthetic construct
  source 1..14: note = mycV.1510 VH FR2
WFRQAPGKEREGVS

SEQ ID NO: 2010 - protein, 17 aa, synthetic construct
  source 1..17: note = mycV.1510 VH CDR2
AISGSGGSTYYADSVKG

SEQ ID NO: 2011 - protein, 30 aa, synthetic construct; identical to SEQ ID NO: 1939
  source 1..30: note = mycV.1510 VH FR3

SEQ ID NO: 2012 - protein, 17 aa, synthetic construct
  source 1..17: note = mycV.1510 VH CDR3
AIIDDILTGGTFDEGDY

SEQ ID NO: 2013 - protein, 11 aa, synthetic construct
  source 1..11: note = mycV.1510 VH FR4
WGRGTQVTVSS

SEQ ID NO: 2014 - protein, 124 aa, synthetic construct
  source 1..124: note = mycV.1509 full
EVQLLESGGGLVQPGGSLRLSCAASGFTFADTDMGWFRQAPGKEREGVSAISGSGGSTYYADSVKGRFTISRDNSKNTLYLQMNSLRAEDTAVYYCAIIDDILTGGTFDEGDYWGRGTQVTVSS

SEQ ID NO: 2015 - protein, 26 aa, synthetic construct
  source 1..26: note = mycV.1509 VH FR1
EVQLLESGGGLVQPGGSLRLSAAASG

SEQ ID NO: 2016 - protein, 9 aa, synthetic construct
  source 1..9: note = mycV.1509 VH CDR1
FTFADTDMG

SEQ ID NO: 2017 - protein, 14 aa, synthetic construct
  source 1..14: note = mycV.1509 VH FR2
WFRQAPGKEREGVS

SEQ ID NO: 2018 - protein, 17 aa, synthetic construct
  source 1..17: note = mycV.1509 VH CDR2
AISGSGGSTYYADSVKG

SEQ ID NO: 2019 - protein, 30 aa, synthetic construct; identical to SEQ ID NO: 1939
  source 1..30: note = mycV.1509 VH FR3

SEQ ID NO: 2020 - protein, 17 aa, synthetic construct
  source 1..17: note = mycV.1509 VH CDR3
AIIDDILTGGTFDEGDY

SEQ ID NO: 2021 - protein, 11 aa, synthetic construct
  source 1..11: note = mycV.1509 VH FR4
WGRGTQVTVSS

SEQ ID NO: 2022 - protein, 124 aa, synthetic construct
  source 1..124: note = mycV.1508 full
EVQLLESGGGLVQPGGSLRLSAAASGFTFADTDMGWFRQAPGREREGVSAISGSGGSTYYADSVKGRFTISRDNSANTLYLQMNSLRAEDTAVYYVAIIDDILTGGTFDEGDYWGRGTQVTVSS

SEQ ID NO: 2023 - protein, 26 aa, synthetic construct
  source 1..26: note = mycV.1508 VH FR1
EVQLLESGGGLVQPGGSLRLSAAASG

SEQ ID NO: 2024 - protein, 9 aa, synthetic construct
  source 1..9: note = mycV.1508 VH CDR1
FTFADTDMG

SEQ ID NO: 2025 - protein, 14 aa, synthetic construct
  source 1..14: note = mycV.1508 VH FR2
WFRQAPGKEREGVS

SEQ ID NO: 2026 - protein, 17 aa, synthetic construct
  source 1..17: note = mycV.1508 VH CDR2
AISGSGGSTYYADSVKG

SEQ ID NO: 2027 - protein, 30 aa, synthetic construct; identical to SEQ ID NO: 1939
  source 1..30: note = mycV.1508 VH FR3

SEQ ID NO: 2028 - protein, 17 aa, synthetic construct
  source 1..17: note = mycV.1508 VH CDR3
AIIDDILTGGTFDEGDY

SEQ ID NO: 2029 - protein, 11 aa, synthetic construct
  source 1..11: note = mycV.1508 VH FR4
WGRGTQVTVSS

SEQ ID NO: 2030 - protein, 124 aa, synthetic construct
  source 1..124: note = mycV.1507 full
EVQLLESGGGLVQPGGSLRLSAAASGFTFADTDMGWFRQAPGAEREGVSAISGSGGSTYYADSVKGRFTISRDNSRNTLYLQMNSLRAEDTAVYYVAIIDDILTGGTFDEGDYWGRGTQVTVSS

SEQ ID NO: 2031 - protein, 26 aa, synthetic construct
  source 1..26: note = mycV.1507 VH FR1
EVQLLESGGGLVQPGGSLRLSAAASG

SEQ ID NO: 2032 - protein, 9 aa, synthetic construct
  source 1..9: note = mycV.1507 VH CDR1
FTFADTDMG

SEQ ID NO: 2033 - protein, 14 aa, synthetic construct
  source 1..14: note = mycV.1507 VH FR2
WFRQAPGKEREGVS

SEQ ID NO: 2034 - protein, 17 aa, synthetic construct
  source 1..17: note = mycV.1507 VH CDR2
AISGSGGSTYYADSVKG

SEQ ID NO: 2035 - protein, 30 aa, synthetic construct; identical to SEQ ID NO: 1939
  source 1..30: note = mycV.1507 VH FR3

SEQ ID NO: 2036 - protein, 17 aa, synthetic construct
  source 1..17: note = mycV.1507 VH CDR3
AIIDDILTGGTFDEGDY

SEQ ID NO: 2037 - protein, 11 aa, synthetic construct
  source 1..11: note = mycV.1507 VH FR4
WGRGTQVTVSS

SEQ ID NO: 2038 - protein, 124 aa, synthetic construct
  source 1..124: note = mycV.1506 full
EVQLLESGGGLVQPGGSLRLSAAASGFTFADTDMGWFRQAPGREREGVSAISGSGGSTYYADSVKGRFTISRDNSRNTLYLQMNSLRAEDTAVYYVAIIDDILTGGTFDEGDYWGRGTQVTVSS

SEQ ID NO: 2039 - protein, 26 aa, synthetic construct
  source 1..26: note = mycV.1506 VH FR1
EVQLLESGGGLVQPGGSLRLSAAASG

SEQ ID NO: 2040 - protein, 9 aa, synthetic construct
  source 1..9: note = mycV.1506 VH CDR1
FTFADTDMG

SEQ ID NO: 2041 - protein, 14 aa, synthetic construct
  source 1..14: note = mycV.1506 VH FR2
WFRQAPGKEREGVS

SEQ ID NO: 2042 - protein, 17 aa, synthetic construct
  source 1..17: note = mycV.1506 VH CDR2
AISGSGGSTYYADSVKG

SEQ ID NO: 2043 - protein, 30 aa, synthetic construct; identical to SEQ ID NO: 1939
  source 1..30: note = mycV.1506 VH FR3

SEQ ID NO: 2044 - protein, 17 aa, synthetic construct
  source 1..17: note = mycV.1506 VH CDR3
AIIDDILTGGTFDEGDY

SEQ ID NO: 2045 - protein, 11 aa, synthetic construct
  source 1..11: note = mycV.1506 VH FR4
WGRGTQVTVSS

SEQ ID NO: 2046 - protein, 124 aa, synthetic construct
  source 1..124: note = mycV.1505 full
EVQLLESGGGLVQPGGSLRLSAAASGFTFADTDMGWFRQAPGAEREGVSAISGSGGSTYYADSVKGRFTISRDNSANTLYLQMNSLRAEDTAVYYVAIIDDILTGGTFDEGDYWGRGTQVTVSS

SEQ ID NO: 2047 - protein, 26 aa, synthetic construct
  source 1..26: note = mycV.1505 VH FR1
EVQLLESGGGLVQPGGSLRLSAAASG

SEQ ID NO: 2048 - protein, 9 aa, synthetic construct
  source 1..9: note = mycV.1505 VH CDR1
FTFADTDMG

SEQ ID NO: 2049 - protein, 14 aa, synthetic construct
  source 1..14: note = mycV.1505 VH FR2
WFRQAPGKEREGVS

SEQ ID NO: 2050 - protein, 17 aa, synthetic construct
  source 1..17: note = mycV.1505 VH CDR2
AISGSGGSTYYADSVKG

SEQ ID NO: 2051 - protein, 30 aa, synthetic construct; identical to SEQ ID NO: 1939
  source 1..30: note = mycV.1505 VH FR3

SEQ ID NO: 2052 - protein, 17 aa, synthetic construct
  source 1..17: note = mycV.1505 VH CDR3
AIIDDILTGGTFDEGDY

SEQ ID NO: 2053 - protein, 11 aa, synthetic construct
  source 1..11: note = mycV.1505 VH FR4
WGRGTQVTVSS

SEQ ID NO: 2054 - protein, 124 aa, synthetic construct
  source 1..124: note = mycV.1504 full
EVQLLESGGGLVQPGGSLRLSAAASGFTFADTDMGWFRQAPGKEREGVSAISGSGGSTYYADSVKGRFTISRDNSRNTLYLQMNSLRAEDTAVYYVAIIDDILTGGTFDEGDYWGRGTQVTVSS

SEQ ID NO: 2055 - protein, 26 aa, synthetic construct
  source 1..26: note = mycV.1504 VH FR1
EVQLLESGGGLVQPGGSLRLSAAASG

SEQ ID NO: 2056 - protein, 9 aa, synthetic construct
  source 1..9: note = mycV.1504 VH CDR1
FTFADTDMG

SEQ ID NO: 2057 - protein, 14 aa, synthetic construct
  source 1..14: note = mycV.1504 VH FR2
WFRQAPGKEREGVS

SEQ ID NO: 2058 - protein, 17 aa, synthetic construct
  source 1..17: note = mycV.1504 VH CDR2
AISGSGGSTYYADSVKG

SEQ ID NO: 2059 - protein, 30 aa, synthetic construct; identical to SEQ ID NO: 1939
  source 1..30: note = mycV.1504 VH FR3

SEQ ID NO: 2060 - protein, 17 aa, synthetic construct
  source 1..17: note = mycV.1504 VH CDR3
AIIDDILTGGTFDEGDY

SEQ ID NO: 2061 - protein, 11 aa, synthetic construct
  source 1..11: note = mycV.1504 VH FR4
WGRGTQVTVSS

SEQ ID NO: 2062 - protein, 124 aa, synthetic construct
  source 1..124: note = mycV.1503 full
EVQLLESGGGLVQPGGSLRLSAAASGFTFADTDMGWFRQAPGKEREGVSAISGSGGSTYYADSVKGRFTISRDNSANTLYLQMNSLRAEDTAVYYVAIIDDILTGGTFDEGDYWGRGTQVTVSS

SEQ ID NO: 2063 - protein, 26 aa, synthetic construct
  source 1..26: note = mycV.1503 VH FR1
EVQLLESGGGLVQPGGSLRLSAAASG

SEQ ID NO: 2064 - protein, 9 aa, synthetic construct
  source 1..9: note = mycV.1503 VH CDR1
FTFADTDMG

SEQ ID NO: 2065 - protein, 14 aa, synthetic construct
  source 1..14: note = mycV.1503 VH FR2
WFRQAPGKEREGVS

SEQ ID NO: 2066 - protein, 17 aa, synthetic construct
  source 1..17: note = mycV.1503 VH CDR2
AISGSGGSTYYADSVKG

SEQ ID NO: 2067 - protein, 30 aa, synthetic construct; identical to SEQ ID NO: 1939
  source 1..30: note = mycV.1503 VH FR3

SEQ ID NO: 2068 - protein, 17 aa, synthetic construct
  source 1..17: note = mycV.1503 VH CDR3
AIIDDILTGGTFDEGDY

SEQ ID NO: 2069 - protein, 11 aa, synthetic construct
  source 1..11: note = mycV.1503 VH FR4
WGRGTQVTVSS

SEQ ID NO: 2070 - protein, 124 aa, synthetic construct
  source 1..124: note = mycV.1502 full
EVQLLESGGGLVQPGGSLRLSAAASGFTFADTDMGWFRQAPGREREGVSAISGSGGSTYYADSVKGRFTISRDNSKNTLYLQMNSLRAEDTAVYYVAIIDDILTGGTFDEGDYWGRGTQVTVSS

SEQ ID NO: 2071 - protein, 26 aa, synthetic construct
  source 1..26: note = mycV.1502 VH FR1
EVQLLESGGGLVQPGGSLRLSAAASG

SEQ ID NO: 2072 - protein, 9 aa, synthetic construct
  source 1..9: note = mycV.1502 VH CDR1
FTFADTDMG

SEQ ID NO: 2073 - protein, 14 aa, synthetic construct
  source 1..14: note = mycV.1502 VH FR2
WFRQAPGKEREGVS

SEQ ID NO: 2074 - protein, 17 aa, synthetic construct
  source 1..17: note = mycV.1502 VH CDR2
AISGSGGSTYYADSVKG

SEQ ID NO: 2075 - protein, 30 aa, synthetic construct; identical to SEQ ID NO: 1939
  source 1..30: note = mycV.1502 VH FR3

SEQ ID NO: 2076 - protein, 17 aa, synthetic construct
  source 1..17: note = mycV.1502 VH CDR3
AIIDDILTGGTFDEGDY

SEQ ID NO: 2077 - protein, 11 aa, synthetic construct
  source 1..11: note = mycV.1502 VH FR4
WGRGTQVTVSS

SEQ ID NO: 2078 - protein, 124 aa, synthetic construct
  source 1..124: note = mycV.1501 full
EVQLLESGGGLVQPGGSLRLSAAASGFTFADTDMGWFRQAPGAEREGVSAISGSGGSTYYADSVKGRFTISRDNSKNTLYLQMNSLRAEDTAVYYVAIIDDILTGGTFDEGDYWGRGTQVTVSS

SEQ ID NO: 2079 - protein, 26 aa, synthetic construct
  source 1..26: note = mycV.1501 VH FR1
EVQLLESGGGLVQPGGSLRLSAAASG

SEQ ID NO: 2080 - protein, 9 aa, synthetic construct
  source 1..9: note = mycV.1501 VH CDR1
FTFADTDMG

SEQ ID NO: 2081 - protein, 14 aa, synthetic construct
  source 1..14: note = mycV.1501 VH FR2
WFRQAPGKEREGVS

SEQ ID NO: 2082 - protein, 17 aa, synthetic construct
  source 1..17: note = mycV.1501 VH CDR2
AISGSGGSTYYADSVKG

SEQ ID NO: 2083 - protein, 30 aa, synthetic construct; identical to SEQ ID NO: 1939
  source 1..30: note = mycV.1501 VH FR3

SEQ ID NO: 2084 - protein, 17 aa, synthetic construct
  source 1..17: note = mycV.1501 VH CDR3
AIIDDILTGGTFDEGDY

SEQ ID NO: 2085 - protein, 11 aa, synthetic construct
  source 1..11: note = mycV.1501 VH FR4
WGRGTQVTVSS

SEQ ID NO: 2086 - protein, 92 aa, synthetic construct; identical to SEQ ID NO: 6
  source 1..92: note = OMOMYC

SEQ ID NO: 2087 - protein, 45 aa, synthetic construct; identical to SEQ ID NO: 11
  source 1..45: note = TCF4.1

SEQ ID NO: 2088 - protein, 34 aa, synthetic construct
  source 1..34: note = TCF4.10
DDLGANDELISFRDEGEQEEAERDLADVRSSLVN

SEQ ID NO: 2089 - protein, 37 aa, synthetic construct
  source 1..37: note = TCF4.11
DDLGANDELISFRDEGEQEAERDLADVKSSLVNESET

SEQ ID NO: 2090 - protein, 34 aa, synthetic construct
  source 1..34: note = TCF4.12
DDLGANDELISFKDEGEQEEAERDLADVKSSLVN

SEQ ID NO: 2091 - protein, 38 aa, synthetic construct
  source 1..38: note = TCF4.14
DDLGANRELASAKDEGEQEEAERDAADVRSSAVNESET

SEQ ID NO: 2092 - protein, 33 aa, synthetic construct
  source 1..33: note = TCF4.15
DDLGANDELISFKDEGEQEAERDLADVKSSLVN

SEQ ID NO: 2093 - protein, 34 aa, synthetic construct
  source 1..34: note = TCF4.16
DDLGANDELISFRDEGEQEEAERDLADVKSSLVN

SEQ ID NO: 2094 - protein, 38 aa, synthetic construct
  source 1..38: note = TCF4.2
DDLGANDELISFKDEGEQEEAERDLADVKSSLVNESET

SEQ ID NO: 2095 - protein, 45 aa, synthetic construct
  source 1..45: note = TCF4.3
DDLGANDELISFKDEGEQEEKSSENSSAERDLADVRSSLVNESET

SEQ ID NO: 2096 - protein, 38 aa, synthetic construct
  source 1..38: note = TCF4.4
DDLGANDELISFKDEGEQEEAERDLADVRSSLVNESET

SEQ ID NO: 2097 - protein, 45 aa, synthetic construct
  source 1..45: note = TCF4.5
DDLGANDELISFRDEGEQEERSSENSSAERDLADVKSSLVNESET

SEQ ID NO: 2098 - protein, 38 aa, synthetic construct
  source 1..38: note = TCF4.6
DDLGANDELISFRDEGEQEEAERDLADVKSSLVNESET

SEQ ID NO: 2099 - protein, 45 aa, synthetic construct
  source 1..45: note = TCF4.7
DDLGANDELISFRDEGEQEERSSENSSAERDLADVRSSLVNESET

SEQ ID NO: 2100 - protein, 38 aa, synthetic construct
  source 1..38: note = TCF4.8
DDLGANDELISFRDEGEQEEAERDLADVRSSLVNESET

SEQ ID NO: 2101 - protein, 41 aa, synthetic construct
  source 1..41: note = TCF4.9
DDLGANDELISFKDEGEQEEKSSENSSAERDLADVKSSLVN

SEQ ID NO: 2102 - protein, 16 aa, synthetic construct
  source 1..16: note = con1.1
SAVLQKKITDYFHPKK

SEQ ID NO: 2103 - protein, 16 aa, synthetic construct
  source 1..16: note = con1.2
SAVLMKKRTDYRHPKK

SEQ ID NO: 2104 - protein, 15 aa, synthetic construct
  source 1..15: note = p21.1
GRRQTSMTDFYHSTR

SEQ ID NO: 2105 - protein, 22 aa, synthetic construct
  source 1..22: note = p21.2
GRGRRQTSMTDYFHSTRRLIFS

SEQ ID NO: 2106 - protein, 15 aa, synthetic construct
  source 1..15: note = p21.3
GRRQTSMTDYFHSTR

SEQ ID NO: 2107 - protein, 15 aa, synthetic construct
  source 1..15: note = p21.4
GRRQTSMTDYYHSTR

SEQ ID NO: 2108 - protein, 15 aa, synthetic construct
  source 1..15: note = p21.5
GRRDSKITDHFHSTR

SEQ ID NO: 2109 - protein, 15 aa, synthetic construct
  source 1..15: note = p21.6
GRRMKSIDTFFHSTR

SEQ ID NO: 2110 - protein, 15 aa, synthetic construct
  source 1..15: note = p21.7
GRRQTRITEYFHSTR

SEQ ID NO: 2111 - protein, 15 aa, synthetic construct
  source 1..15: note = p21.8
GRRQGRLDDFFHSTR

SEQ ID NO: 2112 - protein, 15 aa, synthetic construct
  source 1..15: note = p21.9
GRRDTSMTDFYHSTR

SEQ ID NO: 2113 - protein, 24 aa, synthetic construct
  source 1..24: note = 12xGS
GSGSGSGSGSGSGSGSGSGSGSGS

SEQ ID NO: 2114 - protein, 18 aa, synthetic construct
  source 1..18: note = 9xGS
GSGSGSGSGSGSGSGSGS

SEQ ID NO: 2115 - protein, 12 aa, synthetic construct
  source 1..12: note = 6xGS
GSGSGSGSGSGS

SEQ ID NO: 2116 - protein, 10 aa, synthetic construct
  source 1..10: note = 5xGS
GSGSGSGSGS

SEQ ID NO: 2117 - protein, 8 aa, synthetic construct
  source 1..8: note = 4xGS
GSGSGSGS

SEQ ID NO: 2118 - protein, 6 aa, synthetic construct
  source 1..6: note = 3xGS
GSGSGS

SEQ ID NO: 2119 - protein, 4 aa, synthetic construct
  source 1..4: note = 2xGS
GSGS

SEQ ID NO: 2120 - skipped

SEQ ID NO: 2121 - protein, 14 aa, synthetic construct
  source 1..14: note = 3xGGGS+GS
GGGSGGGSGGGSGS

SEQ ID NO: 2122 - protein, 12 aa, synthetic construct
  source 1..12: note = 3xGGGS
GGGSGGGSGGGS

SEQ ID NO: 2123 - protein, 8 aa, synthetic construct
  source 1..8: note = 2xGGGS
GGGSGGGS

SEQ ID NO: 2124 - protein, 4 aa, synthetic construct
  source 1..4: note = GGGS
GGGS

SEQ ID NO: 2125 - protein, 30 aa, synthetic construct
  source 1..30: note = L3H24L3
GSGMEELNRVKKDAEAITQAKNKEAEQGSG

SEQ ID NO: 2126 - protein, 29 aa, synthetic construct
  source 1..29: note = L2H24L3
SGMEELNRVKKDAEAITQAKNKEAEQGSG

SEQ ID NO: 2127 - protein, 28 aa, synthetic construct
  source 1..28: note = L1H24L3
GMEELNRVKKDAEAITQAKNKEAEQGSG

SEQ ID NO: 2128 - protein, 29 aa, synthetic construct
  source 1..29: note = L3H24L2
GSGMEELNRVKKDAEAITQAKNKEAEQGS

SEQ ID NO: 2129 - protein, 28 aa, synthetic construct
  source 1..28: note = L2H24L2
SGMEELNRVKKDAEAITQAKNKEAEQGS

SEQ ID NO: 2130 - protein, 27 aa, synthetic construct
  source 1..27: note = L1H24L2
GMEELNRVKKDAEAITQAKNKEAEQGS

SEQ ID NO: 2131 - protein, 28 aa, synthetic construct
  source 1..28: note = L3H24L1
GSGMEELNRVKKDAEAITQAKNKEAEQG

SEQ ID NO: 2132 - protein, 27 aa, synthetic construct
  source 1..27: note = L2H24L1
SGMEELNRVKKDAEAITQAKNKEAEQG

SEQ ID NO: 2133 - protein, 26 aa, synthetic construct
  source 1..26: note = L1H24L1
GMEELNRVKKDAEAITQAKNKEAEQG

SEQ ID NO: 2134 - protein, 22 aa, synthetic construct
  source 1..22: note = L3H16L3
GSGMEELNRVKKDAEAITQGSG

SEQ ID NO: 2135 - protein, 21 aa, synthetic construct
  source 1..21: note = L2H16L3
SGMEELNRVKKDAEAITQGSG

SEQ ID NO: 2136 - protein, 20 aa, synthetic construct
  source 1..20: note = L1H16L3
GMEELNRVKKDAEAITQGSG

SEQ ID NO: 2137 - protein, 21 aa, synthetic construct
  source 1..21: note = L3H16L2
GSGMEELNRVKKDAEAITQGS

SEQ ID NO: 2138 - protein, 20 aa, synthetic construct
  source 1..20: note = L2H16L2
SGMEELNRVKKDAEAITQGS

SEQ ID NO: 2139 - protein, 19 aa, synthetic construct
  source 1..19: note = L1H16L2
GMEELNRVKKDAEAITQGS

SEQ ID NO: 2140 - protein, 20 aa, synthetic construct
  source 1..20: note = L3H16L1
GSGMEELNRVKKDAEAITQG

SEQ ID NO: 2141 - protein, 19 aa, synthetic construct
  source 1..19: note = L2H16L1
SGMEELNRVKKDAEAITQG

SEQ ID NO: 2142 - protein, 18 aa, synthetic construct
  source 1..18: note = L1H16L1
GMEELNRVKKDAEAITQG

SEQ ID NO: 2143 - protein, 14 aa, synthetic construct
  source 1..14: note = L3H8L3
GSGMEELNRVKGSG

SEQ ID NO: 2144 - protein, 13 aa, synthetic construct
  source 1..13: note = L2H8L3
SGMEELNRVKGSG

SEQ ID NO: 2145 - protein, 12 aa, synthetic construct
  source 1..12: note = L1H8L3
GMEELNRVKGSG

SEQ ID NO: 2146 - protein, 13 aa, synthetic construct
  source 1..13: note = L3H8L2
GSGMEELNRVKGS

SEQ ID NO: 2147 - protein, 12 aa, synthetic construct
  source 1..12: note = L2H8L2
SGMEELNRVKGS

SEQ ID NO: 2148 - protein, 11 aa, synthetic construct
  source 1..11: note = L1H8L2
GMEELNRVKGS

SEQ ID NO: 2149 - protein, 12 aa, synthetic construct
  source 1..12: note = L3H8L1
GSGMEELNRVKG

SEQ ID NO: 2150 - protein, 11 aa, synthetic construct
  source 1..11: note = L2H8L1
SGMEELNRVKG

SEQ ID NO: 2151 - protein, 10 aa, synthetic construct
  source 1..10: note = L1H8L1
GMEELNRVKG

SEQ ID NO: 2152 - protein, 261 aa, Homo sapiens
  source 1..261: note = Human PCNA Uniprot ID: P12004
MFEARLVQGSILKKVLEALKDLINEACWDISSSGVNLQSMDSSHVSLVQLTLRSEGFDTYRCDRNLAMGVNLTSMSKILKCAGNEDIITLRAEDNADTLALVFEAPNQEKVSDYEMKLMDLDVEQLGIPEQEYSCVVKMPSGEFARICRDLSHIGDAVVISCAKDGVKFSASGELGNGNIKLSQTSNVDKEEEAVTIEMNEPVQLTFALRYLNFFTKATPLSSTVTLSMSADVPLVVEYKIADMGHLKYYLAPKIEDEEGS

SEQ ID NO: 2153 - protein, 190 aa, Homo sapiens
  source 1..190: note = RNF4 human full length Uniprot P78317
MSTRKRRGGAINSRQAQKRTREATSTPEISLEAEPIELVETAGDEIVDLTCESLEPVVVDLTHNDSVVIVDERRRPRRNARRLPQDHADSCVVSSDDEELSRDRDVYVTTHTPRNARDEGATGLRPSGTVSCPICMDGYSEIVQNGRLIVSTECGHVFCSQCLRDSLKNANTCPTCRKKINHKRYHPIYI

SEQ ID NO: 2154 - protein, 685 aa, Homo sapiens [sequence omitted]

SEQ ID NO: 2155 - protein, 154 aa, Homo sapiens
  source 1..154: note = RNF11 human full length Uniprot Q9Y3C5
MGNCLKSPTSDDISLLHESQSDRASFGEGTEPDQEPPPPYQEQVPVPVYHPTPSQTRLATQLTEEEQIRIAQRIGLIQHLPKGVYDPGRDGSEKKIRECVICMMDFVYGDPIRFLPCMHIYHLDCIDDWLMRSFTCPSCMEPVDAALLSSYETN

SEQ ID NO: 2156 - protein, 624 aa, Homo sapiens
  source 1..624: note = RNF12 human full length Uniprot Q9NVW2
MENSDSNDKGSGDQSAAQRRSQMDRLDREEAFYQFVNNLSEEDYRLMRDNNLLGTPGESTEEELLRRLQQIKEGPPPQNSDENRGGDSSDDVSNGDSIIDWLNSVRQTGNTTRSGQRGNQSWRAVSRTNPNSGDFRFSLEINVNRNNGSQNSENENEPSARRSSGENVENNSQRQVENPRSESTSARPSRSERNSTEALTEVPPTRGQRRARSRSPDHRRTRARAERSRSPLHPMSEIPRRSHHSISSQTFEHPLVNETEGSSRTRHHVTLRQQISGPELLSRGLFAASGTRNASQGAGSSDTAASGESTGSGQRPPTIVLDLQVRRVRPGEYRQRDSIASRTRSRSQTPNNTVTYESERGGFRRTFSRSERAGVRTYVSTIRIPIRRILNTGLSETTSVAIQTMLRQIMTGFGELSYFMYSDSDSEPTGSVSNRNMERAESRSGRGGSGGGSSSGSSSSSSSSSSSSSSSSSSSSPSSSSGGESSETSSDLFEGSNEGSSSSGSSGARREGRHRAPVTFDESGSLPFLSLAQFFLLNEDDDDQPRGLTKEQIDNLAMRSFGENDALKTCSVCITEYTEGNKLRKLPCSHEYHVHCIDRWLSENSTCPICRRAVLASGNRESVV

SEQ ID NO: 2157 - protein, 975 aa, Homo sapiens
  source 1..975: note = RNF20 human full length Uniprot Q5VTR2
MSGIGNKRAAGEPGTSMPPEKKAAVEDSGTTVETIKLGGVSSTEELDIRTLQTKNRKLAEMLDQRQAIEDELREHIEKLERRQATDDASLLIVNRYWSQFDENIRIILKRYDLEQGLGDLLTERKALVVPEPEPDSDSNQERKDDRERGEGQEPAFSFLATLASSSSEEMESQLQERVESSRRAVSQIVTVYDKLQEKVELLSRKLNSGDNLIVEEAVQELNSFLAQENMRLQELTDLLQEKHRTMSQEFSKLQSKVETAESRVSVLESMIDDLQWDIDKIRKREQRLNRHLAEVLERVNSKGYKVYGAGSSLYGGTITINARKFEEMNAELEENKELAQNRLCELEKLRQDFEEVTTQNEKLKVELRSAVEQVVKETPEYRCMQSQFSVLYNESLQLKAHLDEARTLLHGTRGTHQHQVELIERDEVSLHKKLRTEVIQLEDTLAQVRKEYEMLRIEFEQTLAANEQAGPINREMRHLISSLQNHNHQLKGEVLRYKRKLREAQSDLNKTRLRSGSALLQSQSSTEDPKDEPAELKPDSEDLSSQSSASKASQEDANEIKSKRDEEERERERREKEREREREREKEKEREREKQKLKESEKERDSAKDKEKGKHDDGRKKEAEIIKQLKIELKKAQESQKEMKLLLDMYRSAPKEQRDKVQLMAAEKKSKAELEDLRQRLKDLEDKEKKENKKMADEDALRKIRAVEEQIEYLQKKLAMAKQEEEALLSEMDVTGQAFEDMQEQNIRLMQQLREKDDANFKLMSERIKSNQIHKLLKEEKEELADQVLTLKTQVDAQLQVVRKLEEKEHLLQSNIGTGEKELGLRTQALEMNKRKAMEAAQLADDLKAQLELAQKKLHDFQDEIVENSVTKEKDMFNFKRAQEDISRLRRKLETTKKPDNVPKCDEILMEEIKDYKARLTCPCCNMRKKDAVLTKCFHVFCFECVKTRYDTRQRKCPKCNAAFGANDFHRIYIG

SEQ ID NO: 2158 - protein, 459 aa, Homo sapiens
  source 1..459: note = RNF25 human full length Uniprot Q96BH1
MAASASAAAGEEDWVLPSEVEVLESIYLDELQVIKGNGRTSPWEIYITLHPATAEDQDSQYVCFTLVLQVPAEYPHEVPQISIRNPRGLSDEQIHTILQVLGHVAKAGLGTAMLYELIEKGKEILTDNNIPHGQCVICLYGFQEKEAFTKTPCYHYFHCHCLARYIQHMEQELKAQGQEQEQERQHATTKQKAVGVQCPVCREPLVYDLASLKAAPEPQQPMELYQPSAESLRQQEERKRLYQRQQERGGIIDLEAERNRYFISLQQPPAPAEPESAVDVSKGSQPPSTLAAELSTSPAVQSTLPPPLPVATQHICEKIPGTRSNQQRLGETQKAMLDPPKPSRGPWRQPERRHPKGGECHAPKGTRDTQELPPPEGPLKEPMDLKPEPHSQGVEGPPQEKGPGSWQGPPPRRTRDCVRWERSKGRTPGSSYPRLPRGQGAYRPGTRRESLGLESKDGS

SEQ ID NO: 2159 - protein, 994 aa, Homo sapiens
  source 1..994: note = RNF111 human full length Uniprot Q6ZNA4
MSQWTPEYNELYTLKVDMKSEIPSDAPKTQESLKGILLHPEPIGAAKSFPAGVEMINSKVGNEFSHLCDDSQKQEKEMNGNQQEQEKSLVVRKKRKSQQAGPSYVQNCVKENQGILGLRQHLGTPSDEDNDSSFSDCLSSPSSSLHFGDSDTVTSDEDKEVSVRHSQTILNAKSRSHSARSHKWPRTETESVSGLLMKRPCLHGSSLRRLPCRKRFVKNNSSQRTQKQKERILMQRKKREVLARRKYALLPSSSSSSENDLSSESSSSSSTEGEEDLFVSASENHQNNPAVPSGSIDEDVVVIEASSTPQVTANEEINVTSTDSEVEIVTVGESYRSRSTLGHSRSHWSQGSSSHASRPQEPRNRSRISTVIQPLRQNAAEVVDLTVDEDEPTVVPTTSARMESQATSASINNSNPSTSEQASDTASAVTSSQPSTVSETSATLTSNSTTGTSIGDDSRRTTSSAVTETGPPAMPRLPSCCPQHSPCGGSSQNHHALGHPHTSCFQQHGHHFQHHHHHHHTPHPAVPVSPSFSDPACPVERPPQVQAPCGANSSSGTSYHEQQALPVDLSNSGIRSHGSGSFHGASAFDPCCPVSSSRAAIFGHQAAAAAPSQPLSSIDGYGSSMVAQPQPQPPPQPSLSSCRHYMPPPYASLTRPLHHQASACPHSHGNPPPQTQPPPQVDYVIPHPVHAFHSQISSHATSHPVAPPPPTHLASTAAPIPQHLPPTHQPISHHIPATAPPAQRLHPHEVMQRMEVQRRRMMQHPTRAHERPPPHPHRMHPNYGHGHHIHVPQTMSSHPRQAPERSAWELGIEAGVTAATYTPGALHPHLAHYHAPPRLHHLQLGALPLMVPDMAGYPHIRYISSGLDGTSFRGPFRGNFEELIHLEERLGNVNRGASQGTIERCTYPHKYKKVTTDWFSQRKLHCKQDGEEGTEEDTEEKCTICLSILEEGEDVRRLPCMHLFHQVCVDQWLITNKKCPICRVDIEAQLPSES

SEQ ID NO: 2160 - protein, 304 aa, Homo sapiens
  source 1..304: note = RNF115 human full length Uniprot Q9Y4L5
MAEASAAGADSGAAVAAHRFFCHFCKGEVSPKLPEYICPRCESGFIEEVTDDSSFLGGGGSRIDNTTTTHFAELWGHLDHTMFFQDFRPFLSSSPLDQDNRANERGHQTHTDFWGARPPRLPLGRRYRSRGSSRPDRSPAIEGILQHIFAGFFANSAIPGSPHPFSWSGMLHSNPGDYAWGQTGLDAIVTQLLGQLENTGPPPADKEKITSLPTVTVTQEQVDMGLECPVCKEDYTVEEEVRQLPCNHFFHSSCIVPWLELHDTCPVCRKSLNGEDSTRQSQSTEASASNRFSNDSQLHDRWTF

SEQ ID NO: 2161 - protein, 428 aa, Homo sapiens
  source 1..428: note = RNF128 human full length Uniprot Q8TEB7
MGPPPGAGVSCRGGCGFSRLLAWCFLLALSPQAPGSRGAEAVWTAYLNVSWRVPHTGVNRTVWELSEEGVYGQDSPLEPVAGVLVPPDGPGALNACNPHTNFTVPTVWGSTVQVSWLALIQRGGGCTFADKIHLAYERGASGAVIFNFPGTRNEVIPMSHPGAVDIVAIMIGNLKGTKILQSIQRGIQVTMVIEVGKKHGPWVNHYSIFFVSVSFFIITAATVGYFIFYSARRLRNARAQSRKQRQLKADAKKAIGRLQLRTLKQGDKEIGPDGDSCAVCIELYKPNDLVRILTCNHIFHKTCVDPWLLEHRTCPMCKCDILKALGIEVDVEDGSVSLQVPVSNEISNSASSHEEDNRSETASSGYASVQGTDEPPLEEHVQSTNESLQLVNHEANSVAVDVIPHVDNPTFEEDETPNQETAVREIKS

SEQ ID NO: 2162 - protein, 400 aa, Homo sapiens
  source 1..400: note = RNF149 human full length Uniprot Q8NC42
MAWRRREASVGARGVLALALLALALCVPGARGRALEWFSAVVNIEYVDPQTNLTVWSVSESGRFGDSSPKEGAHGLVGVPWAPGGDLEGCAPDTRFFVPEPGGRGAAPWVALVARGGCTFKDKVLVAARRNASAVVLYNEERYGNITLPMSHAGTGNIVVIMISYPKGREILELVQKGIPVTMTIGVGTRHVQEFISGQSVVFVAIAFITMMIISLAWLIFYYIQRFLYTGSQIGSQSHRKETKKVIGQLLLHTVKHGEKGIDVDAENCAVCIENFKVKDIIRILPCKHIFHRICIDPWLLDHRTCPMCKLDVIKALGYWGEPGDVQEMPAPESPPGRDPAANLSLALPDDDGSDDSSPPSASPAESEPQCDPSFKGDAGENTALLEAGRSDSRHGGPIS

SEQ ID NO: 2163 - protein, 203 aa, Homo sapiens
  source 1..203: note = RNF152 human full length Uniprot Q8N8N0
METLSQDSLLECQICFNYYSPRRRPKLLDCKHTCCSVCLQQMRTSQKDVRCPWCRGVTKLPPGFSVSQLPDDPEVLAVIAIPHTSEHTPVFIKLPSNGCYMLPLPISKERALLPGDMGCRLLPGSQQKSVTVVTIPAEQQPLQGGAPQEAVEEEQDRRGVVKSSTWSGVCTVILVACVLVFLLGIVLHNMSCISKRFTVISCG

SEQ ID NO: 2164 - protein, 346 aa, Homo sapiens
  source 1..346: note = RNF165 human full length Uniprot Q6ZSG1
MVLVHVGYLVLPVFGSVRNRGAPFQRSQHPHATSCRHFHLGPPQPQQLAPDFPLAHPVQSQPGLSAHMAPAHQHSGALHQSLTPLPTLQFQDVTGPSFLPQALHQQYLLQQQLLEAQHRRLVSHPRRSQERVSVHPHRLHPSFDFGQLQTPQPRYLAEGTDWDLSVDAGLSPAQFQVRPIPQHYQHYLATPRMHHFPRNSSSTQMVVHEIRNYPYPQLHFLALQGLNPSRHTSAVRESYEELLQLEDRLGNVTRGAVQNTIERFTFPHKYKKRRPQDGKGKKDEGEESDTDEKCTICLSMLEDGEDVRRLPCMHLFHQLCVDQWLAMSKKCPICRVDIETQLGADS

SEQ ID NO: 2165 - protein, 247 aa, Homo sapiens
  source 1..247: note = RNF182 human full length Uniprot Q8N6D2
MASQPPEDTAESQASDELECKICYNRYNLKQRKPKVLECCHRVCAKCLYKIIDFGDSPQGVIVCPFCRFETCLPDDEVSSLPDDNNILVNLTCGGKGKKCLPENPTELLLTPKRLASLVSPSHTSSNCLVITIMEVQRESSPSLSSTPVVEFYRPASFDSVTTVSHNWTVWNCTSLLFQTSIRVLVWLLGLLYFSSLPLGIYLLVSKKVTLGVVFVSLVPSSLVILMVYGFCQCVCHEFLDCMAPPS

SEQ ID NO: 2166 - protein, 653 aa, Homo sapiens
  source 1..653: note = TRIM32 human full length Uniprot Q13049
MAAAAASHLNLDALREVLECPICMESFTEEQLRPKLLHCGHTICRQCLEKLLASSINGVRCPFCSKITRITSLTQLTDNLTVLKIIDTAGLSEAVGLLMCRSCGRRLPRQFCRSCGLVLCEPCREADHQPPGHCTLPVKEAAEERRRDFGEKLTRLRELMGELQRRKAALEGVSKDLQARYKAVLQEYGHEERRVQDELARSRKFFTGSLAEVEKSNSQVVEEQSYLLNIAEVQAVSRCDYFLAKIKQADVALLEETADEEEPELTASLPRELTLQDVELLKVGHVGPLQIGQAVKKPRTVNVEDSWAMEATASAASTSVTFREMDMSPEEVVASPRASPAKQRGPEAASNIQQCLFLKKMGAKGSTPGMFNLPVSLYVTSQGEVLVADRGNYRIQVFTRKGFLKEIRRSPSGIDSFVLSFLGADLPNLTPLSVAMNCQGLIGVTDSYDNSLKVYTLDGHCVACHRSQLSKPWGITALPSGQFVVTDVEGGKLWCFTVDRGSGVVKYSCLCSAVRPKFVTCDAEGTVYFTQGLGLNLENRQNEHHLEGGFSIGSVGPDGQLGRQISHFFSENEDFRCIAGMCVDARGDLIVADSSRKEILHFPKGGGYSVLIREGLTCPVGIALTPKGQLLVLDCWDHCIKIYSYHLRRYSTP

SEQ ID NO: 2167 - protein, 192 aa, Human immunodeficiency virus type 1
  source 1..192: note = VIF human full length Uniprot P12504
MENRWQVMIVWQVDRMRINTWKRLVKHHMYISRKAKDWFYRHHYESTNPKISSEVHIPLGDAKLVITTYWGLHTGERDWHLGQGVSIEWRKKRYSTQVDPDLADQLIHLHYFDCFSESAIRNTILGRIVSPRCEYQAGHNKVGSLQYLALAALIKPKQIKPPLPSVRKLTEDRWNKPQKTKGHRGSHTMNGH

SEQ ID NO: 2168 - protein, 227 aa, Homo sapiens
  source 1..227: note = ZNRF1 human full length Uniprot Q8ND25
MGGKQSTAARSRGPFPGVSTDDSAVPPPGGAPHFGHYRTGGGAMGLRSRSVSSVAGMGMDPSTAGGVPFGLYTPASRGTGDSERAPGGGGSASDSTYAHGNGYQETGGGHHRDGMLYLGSRASLADALPLHIAPRWFSSHSGFKCPICSKSVASDEMEMHFIMCLSKPRLSYNDDVLTKDAGECVICLEELLQGDTIARLPCLCIYHKSCIDSWFEVNRSCPEHPAD

SEQ ID NO: 2169 - protein, 429 aa, Homo sapiens
  source 1..429: note = ZNRF4 human full length Uniprot Q8WWF5
MPLCRPEHLMPRASRVPVAASLPLSHAVIPTQLPSRPGHRPPGRPRRCPKASCLPPPVGPSSTQTAKRVTMGWPRPGRALVAVKALLVLSLLQVPAQAVVRAVLEDNSSSVDFADLPALFGVPLAPEGIRGYLMEVKPANACHPIEAPRLGNRSLGAIVLIRRYDCTFDLKVLNAQRAGFEAAIVHNVHSDDLVSMTHVYEDLRGQIAIPSVFVSEAASQDLRVILGCNKSAHALLLPDDPPCHDLGCHPVLTVSWVLGCTLALVVSAFFVLNHLWLWAQACCSHRRPVKTSTCQKAQVRTFTWHNDLCAICLDEYEEGDQLKILPCSHTYHCKCIDPWFSQAPRRSCPVCKQSVAATEDSFDSTTYSFRDEDPSLPGHRPPIWAIQVQLRSRRLELLGRASPHCHCSTTSLEAEYTTVSSAPPEAPGQ

SEQ ID NO: 2170 - protein, 240 aa, synthetic construct
  source 1..240: note = HA-con1.1-SPOP.2
MYPYDVPDYAGSGSGSSAVLQKKITDYFHPKKSVNISGQNTMNMVKVPECRLADELGGLWENSRFTDCCLCVAGQEFQAHKAILAARSPVFSAMFEHEMEESKKNRVEINDVEPEVFKEMMCFIYTGKAPNLDKMADDLLAAADKYALERLKVMCEDALCSNLSVENAAEILILADLHSADQLKTQAVDFINYHASDVLETSGWKSMVVSHPHLVAEAYRSLASAQCPFLGPPRKRLKQS

SEQ ID NO: 2171 - protein, 226 aa, synthetic construct
  source 1..226: note = HA-con1.1-SPOP.3
MYPYDVPDYAGSGSGSSAVLQKKITDYFHPKKSVNISGQNTMNMVKVPECRLADELGGLWENSRFTDCCLCVAGQEFQAHKAILAARSPVFSAMFEHEMEESKKNRVEINDVEPEVFKEMMCFIYTGKAPNLDKMADDLLAAADKYALERLKVMCEDALCSNLSVENAAEILILADLHSADQLKTQAVDFINYHASDVLETSGWKSMVVSHPHLVAEAYRSLASAQ

SEQ ID NO: 2172 - protein, 200 aa, synthetic construct
  source 1..200: note = TCF4.16-(GS)6-NHLRC1.1-(GS)6-TCF4.6-spNLS.2
MGDDLGANDELISFRDEGEQEEAERDLADVKSSLVNGSGSGSGSGSGSESGPALHELMREAEISLLECKVCFEKFGHRQQRRPRNLSCGHVVCLACVAALAHPRTLALECPFCRRACRGCDTSDCLPVLHLIELLGSALRGSGSGSGSGSGSDDLGANDELISFRDEGEQEEAERDLADVKSSLVNESETGPPRKRLKQS

SEQ ID NO: 2173 - protein, 188 aa, synthetic construct
  source 1..188: note = TCF4.16-(GS)6-NHLRC1.1-TCF4.6-spNLS.2
MGDDLGANDELISFRDEGEQEEAERDLADVKSSLVNGSGSGSGSGSGSESGPALHELMREAEISLLECKVCFEKFGHRQQRRPRNLSCGHVVCLACVAALAHPRTLALECPFCRRACRGCDTSDCLPVLHLIELLGSALRDDLGANDELISFRDEGEQEEAERDLADVKSSLVNESETGPPRKRLKQS

SEQ ID NO: 2174 - protein, 186 aa, synthetic construct
  source 1..186: note = mycNLS-TCF4.6-(GS)3-RNF165.1-(GS)3-TCF4.6
MGPAAKRVKLDGSGSGSDDLGANDELISFRDEGEQEEAERDLADVKSSLVNESETGSGSGSNTIERFTFPHKYKKRRPQDGKGKKDEGEESDTDEKCTICLSMLEDGEDVRRLPCMHLFHQLCVDQWLAMSKKCPICRVDIEGSGSGSDDLGANDELISFRDEGEQEEAERDLADVKSSLVNESET

SEQ ID NO: 2175 - protein, 174 aa, synthetic construct
  source 1..174: note = mycNLS-TCF4.6-RNF165.1-TCF4.6
MGPAAKRVKLDGSGSGSDDLGANDELISFRDEGEQEEAERDLADVKSSLVNESETNTIERFTFPHKYKKRRPQDGKGKKDEGEESDTDEKCTICLSMLEDGEDVRRLPCMHLFHQLCVDQWLAMSKKCPICRVDIEDDLGANDELISFRDEGEQEEAERDLADVKSSLVNESET

SEQ ID NO: 2176 - protein, 329 aa, synthetic construct
  source 1..329: note HA-mycNLS-TCF4.2-(GS)3-RNF125.2-(GS)3-mycV.1500-hrpNLS
MGYPYDVPDYAPAAKRVKLDGSGSGSDDLGANDELISFKDEGEQEEAERDLADVKSSLVNESETGSGSGSTSFDCAVCLEVLHQPVRTRCGHVFCRSCIATSLKNNKWTCPYCRAYLPSEGVPATDVAKRMKSEYKNCAECDTLVCLSEMRAHIRTCQKYIDKYGPGSGSGSEVQLLESGGGLVQPGGSLRLSAAASGFTFADTDMGWFRQAPGKEREGVSAISGSGGSTYYADSVKGRFTISRDNSKNTLYLQMNSLRAEDTAVYYVAIIDDILTGGTFDEGDYWGRGTQVTVSSGGGSGSRSGGNHRRNGRGGRGGYNRRNNGYHPY

SEQ ID NO: 2177 - protein, 329 aa, synthetic construct
  source 1..329: note HA-mycNLS-mycV.1500-(GS)3-RNF125.2-(GS)3-TCF4.2-hrpNLS
MGYPYDVPDYAPAAKRVKLDGSGSGSEVQLLESGGGLVQPGGSLRLSAAASGFTFADTDMGWFRQAPGKEREGVSAISGSGGSTYYADSVKGRFTISRDNSKNTLYLQMNSLRAEDTAVYYVAIIDDILTGGTFDEGDYWGRGTQVTVSSGSGSGSTSFDCAVCLEVLHQPVRTRCGHVFCRSCIATSLKNNKWTCPYCRAYLPSEGVPATDVAKRMKSEYKNCAECDTLVCLSEMRAHIRTCQKYIDKYGPGSGSGSDDLGANDELISFKDEGEQEEAERDLADVKSSLVNESETGGGSGSRSGGNHRRNGRGGRGGYNRRNNGYHPY

SEQ ID NO: 2178 - protein, 325 aa, synthetic construct
  source 1..325: note HA-mycNLS-OMOMYC+J2194:J2204-(GS)3-RNF125.2-(GS)3-TCF4
MGYPYDVPDYAPAAKRVKLDGSGSGSTSFDCAVCLEVLHQPVRTRCGHVFCRSCIATSLKNNKWTCPYCRAYLPSEGVPATDVAKRMKSEYKNCAECDTLVCLSEMRAHIRTCQKYIDKYGPGGGSDDLGANDELISFKDEGEQEEAERDLADVKSSLVNESETGGGSEVQLLESGGGLVQPGGSLRLSAAASGFTFADTDMGWFRQAPGKEREGVSAISGSGGSTYYADSVKGRFTISRDNSKNTLYLQMNSLRAEDTAVYYVAIIDDILTGGTFDEGDYWGRGTQVTVSSGGGSGSRSGGNHRRNGRGGRGGYNRRNNGYHPY

SEQ ID NO: 2179 - protein, 325 aa, synthetic construct
  source 1..325: note = HA-mycNLS-RNF125.2-GGGS-mycV.1500-GGGS-TCF4.2-hrpNLS
MGYPYDVPDYAPAAKRVKLDGSGSGSTSFDCAVCLEVLHQPVRTRCGHVFCRSCIATSLKNNKWTCPYCRAYLPSEGVPATDVAKRMKSEYKNCAECDTLVCLSEMRAHIRTCQKYIDKYGPGGGSEVQLLESGGGLVQPGGSLRLSAAASGFTFADTDMGWFRQAPGKEREGVSAISGSGGSTYYADSVKGRFTISRDNSKNTLYLQMNSLRAEDTAVYYVAIIDDILTGGTFDEGDYWGRGTQVTVSSGGGSDDLGANDELISFKDEGEQEEAERDLADVKSSLVNESETGGGSGSRSGGNHRRNGRGGRGGYNRRNNGYHPY

SEQ ID NO: 2180 - protein, 325 aa, synthetic construct
  source 1..325: note = HA-mycNLS-mycV.1500-GGGS-TCF4.2-GGGS-RNF125.2-hrpNLS
MGYPYDVPDYAPAAKRVKLDGSGSGSEVQLLESGGGLVQPGGSLRLSAAASGFTFADTDMGWFRQAPGKEREGVSAISGSGGSTYYADSVKGRFTISRDNSKNTLYLQMNSLRAEDTAVYYVAIIDDILTGGTFDEGDYWGRGTQVTVSSGGGSDDLGANDELISFKDEGEQEEAERDLADVKSSLVNESETGGGSTSFDCAVCLEVLHQPVRTRCGHVFCRSCIATSLKNNKWTCPYCRAYLPSEGVPATDVAKRMKSEYKNCAECDTLVCLSEMRAHIRTCQKYIDKYGPGGGSGSRSGGNHRRNGRGGRGGYNRRNNGYHPY

SEQ ID NO: 2181 - protein, 325 aa, synthetic construct
  source 1..325: note = HA-mycNLS-TCF4.2-GGGS-mycV.1500-GGGS-RNF125.2-hrpNLS
MGYPYDVPDYAPAAKRVKLDGSGSGSDDLGANDELISFKDEGEQEEAERDLADVKSSLVNESETGGGSEVQLLESGGGLVQPGGSLRLSAAASGFTFADTDMGWFRQAPGKEREGVSAISGSGGSTYYADSVKGRFTISRDNSKNTLYLQMNSLRAEDTAVYYVAIIDDILTGGTFDEGDYWGRGTQVTVSSGGGSTSFDCAVCLEVLHQPVRTRCGHVFCRSCIATSLKNNKWTCPYCRAYLPSEGVPATDVAKRMKSEYKNCAECDTLVCLSEMRAHIRTCQKYIDKYGPGGGSGSRSGGNHRRNGRGGRGGYNRRNNGYHPY

SEQ ID NO: 2182 - protein, 321 aa, synthetic construct
  source 1..321: note = HA-mycNLS-NHLRC1.1-GGGS-mycV.1500-GGGS-TCF4.2-hrpNLS
MGYPYDVPDYAPAAKRVKLDGSGSGSESGPALHELMREAEISLLECKVCFEKFGHRQQRRPRNLSCGHVVCLACVAALAHPRTLALECPFCRRACRGCDTSDCLPVLHLIELLGSALRGGGSEVQLLESGGGLVQPGGSLRLSAAASGFTFADTDMGWFRQAPGKEREGVSAISGSGGSTYYADSVKGRFTISRDNSKNTLYLQMNSLRAEDTAVYYVAIIDDILTGGTFDEGDYWGRGTQVTVSSGGGSDDLGANDELISFKDEGEQEEAERDLADVKSSLVNESETGGGSGSRSGGNHRRNGRGGRGGYNRRNNGYHPY

SEQ ID NO: 2183 - protein, 321 aa, synthetic construct
  source 1..321: note = HA-mycNLS-NHLRC1.1-GGGS-TCF4.2-GGGS-mycV.1500-hrpNLS
MGYPYDVPDYAPAAKRVKLDGSGSGSESGPALHELMREAEISLLECKVCFEKFGHRQQRRPRNLSCGHVVCLACVAALAHPRTLALECPFCRRACRGCDTSDCLPVLHLIELLGSALRGGGSDDLGANDELISFKDEGEQEEAERDLADVKSSLVNESETGGGSEVQLLESGGGLVQPGGSLRLSAAASGFTFADTDMGWFRQAPGKEREGVSAISGSGGSTYYADSVKGRFTISRDNSKNTLYLQMNSLRAEDTAVYYVAIIDDILTGGTFDEGDYWGRGTQVTVSSGGGSGSRSGGNHRRNGRGGRGGYNRRNNGYHPY

SEQ ID NO: 2184 - protein, 321 aa, synthetic construct
  source 1..321: note = HA-mycNLS-mycV.1500-GGGS-TCF4.2-GGGS-NHLRC1.1-hrpNLS
MGYPYDVPDYAPAAKRVKLDGSGSGSEVQLLESGGGLVQPGGSLRLSAAASGFTFADTDMGWFRQAPGKEREGVSAISGSGGSTYYADSVKGRFTISRDNSKNTLYLQMNSLRAEDTAVYYVAIIDDILTGGTFDEGDYWGRGTQVTVSSGGGSDDLGANDELISFKDEGEQEEAERDLADVKSSLVNESETGGGSESGPALHELMREAEISLLECKVCFEKFGHRQQRRPRNLSCGHVVCLACVAALAHPRTLALECPFCRRACRGCDTSDCLPVLHLIELLGSALRGGGSGSRSGGNHRRNGRGGRGGYNRRNNGYHPY

SEQ ID NO: 2185 - protein, 321 aa, synthetic construct
  source 1..321: note = HA-mycNLS-TCF4.2-GGGS-mycV.1500-GGGS-NHLRC1.1-hrpNLS
MGYPYDVPDYAPAAKRVKLDGSGSGSDDLGANDELISFKDEGEQEEAERDLADVKSSLVNESETGGGSEVQLLESGGGLVQPGGSLRLSAAASGFTFADTDMGWFRQAPGKEREGVSAISGSGGSTYYADSVKGRFTISRDNSKNTLYLQMNSLRAEDTAVYYVAIIDDILTGGTFDEGDYWGRGTQVTVSSGGGSESGPALHELMREAEISLLECKVCFEKFGHRQQRRPRNLSCGHVVCLACVAALAHPRTLALECPFCRRACRGCDTSDCLPVLHLIELLGSALRGGGSGSRSGGNHRRNGRGGRGGYNRRNNGYHPY

SEQ ID NO: 2186 - protein, 321 aa, synthetic construct
  source 1..321: note = HA-mycNLS-mycV.1500-GGGS-NHLRC1.1-GGGS-TCF4.2-hrpNLS
MGYPYDVPDYAPAAKRVKLDGSGSGSEVQLLESGGGLVQPGGSLRLSAAASGFTFADTDMGWFRQAPGKEREGVSAISGSGGSTYYADSVKGRFTISRDNSKNTLYLQMNSLRAEDTAVYYVAIIDDILTGGTFDEGDYWGRGTQVTVSSGGGSESGPALHELMREAEISLLECKVCFEKFGHRQQRRPRNLSCGHVVCLACVAALAHPRTLALECPFCRRACRGCDTSDCLPVLHLIELLGSALRGGGSDDLGANDELISFKDEGEQEEAERDLADVKSSLVNESETGGGSGSRSGGNHRRNGRGGRGGYNRRNNGYHPY

SEQ ID NO: 2187 - protein, 321 aa, synthetic construct
  source 1..321: note = HA-mycNLS-TCF4.2-GGGS-NHLRC1.1-GGGS-mycV.1500-hrpNLS
MGYPYDVPDYAPAAKRVKLDGSGSGSDDLGANDELISFKDEGEQEEAERDLADVKSSLVNESETGGGSESGPALHELMREAEISLLECKVCFEKFGHRQQRRPRNLSCGHVVCLACVAALAHPRTLALECPFCRRACRGCDTSDCLPVLHLIELLGSALRGGGSEVQLLESGGGLVQPGGSLRLSAAASGFTFADTDMGWFRQAPGKEREGVSAISGSGGSTYYADSVKGRFTISRDNSKNTLYLQMNSLRAEDTAVYYVAIIDDILTGGTFDEGDYWGRGTQVTVSSGGGSGSRSGGNHRRNGRGGRGGYNRRNNGYHPY

SEQ ID NO: 2188 - protein, 264 aa, synthetic construct
  source 1..264: note = mycNLS-mycV.1500-RNF165.1-(GS)2-TCF4.6
MGPAAKRVKLDGSGSGSEVQLLESGGGLVQPGGSLRLSAAASGFTFADTDMGWFRQAPGKEREGVSAISGSGGSTYYADSVKGRFTISRDNSKNTLYLQMNSLRAEDTAVYYVAIIDDILTGGTFDEGDYWGRGTQVTVSSNTIERFTFPHKYKKRRPQDGKGKKDEGEESDTDEKCTICLSMLEDGEDVRRLPCMHLFHQLCVDQWLAMSKKCPICRVDIEGSGSDDLGANDELISFRDEGEQEEAERDLADVKSSLVNESET

SEQ ID NO: 2189 - protein, 263 aa, synthetic construct
  source 1..263: note = HA-mycNLS-TCF4.2-(GS)3-RNF125.2-(GS)3-OMOMYC
MYPYDVPDYAPAAKRVKLDGSGSGSDDLGANDELISFKDEGEQEEAERDLADVKSSLVNESETGSGSGSTSFDCAVCLEVLHQPVRTRCGHVFCRSCIATSLKNNKWTCPYCRAYLPSEGVPATDVAKRMKSEYKNCAECDTLVCLSEMRAHIRTCQKYIDKYGPGSGSGSSDTEENVKRRTHNVLERQRRNELKRSFFALRDQIPELENNEKAPKVVILKKATAYILSVQAETQKLISEIDLLRKQNEQLKHKLEQLRNSCA

SEQ ID NO: 2190 - protein, 270 aa, synthetic construct
  source 1..270: note = HA-mycNLS-TCF4.3-(GS)3-RNF125.2-(GS)3-OMOMYC
MYPYDVPDYAPAAKRVKLDGSGSGSDDLGANDELISFKDEGEQEEKSSENSSAERDLADVRSSLVNESETGSGSGSTSFDCAVCLEVLHQPVRTRCGHVFCRSCIATSLKNNKWTCPYCRAYLPSEGVPATDVAKRMKSEYKNCAECDTLVCLSEMRAHIRTCQKYIDKYGPGSGSGSSDTEENVKRRTHNVLERQRRNELKRSFFALRDQIPELENNEKAPKVVILKKATAYILSVQAETQKLISEIDLLRKQNEQLKHKLEQLRNSCA

SEQ ID NO: 2191 - protein, 263 aa, synthetic construct
  source 1..263: note = HA-mycNLS-TCF4.4-(GS)3-RNF125.2-(GS)3-OMOMYC
MYPYDVPDYAPAAKRVKLDGSGSGSDDLGANDELISFKDEGEQEEAERDLADVRSSLVNESETGSGSGSTSFDCAVCLEVLHQPVRTRCGHVFCRSCIATSLKNNKWTCPYCRAYLPSEGVPATDVAKRMKSEYKNCAECDTLVCLSEMRAHIRTCQKYIDKYGPGSGSGSSDTEENVKRRTHNVLERQRRNELKRSFFALRDQIPELENNEKAPKVVILKKATAYILSVQAETQKLISEIDLLRKQNEQLKHKLEQLRNSCA

SEQ ID NO: 2192 - protein, 270 aa, synthetic construct
  source 1..270: note = HA-mycNLS-TCF4.5-(GS)3-RNF125.2-(GS)3-OMOMYC
MYPYDVPDYAPAAKRVKLDGSGSGSDDLGANDELISFRDEGEQEERSSENSSAERDLADVKSSLVNESETGSGSGSTSFDCAVCLEVLHQPVRTRCGHVFCRSCIATSLKNNKWTCPYCRAYLPSEGVPATDVAKRMKSEYKNCAECDTLVCLSEMRAHIRTCQKYIDKYGPGSGSGSSDTEENVKRRTHNVLERQRRNELKRSFFALRDQIPELENNEKAPKVVILKKATAYILSVQAETQKLISEIDLLRKQNEQLKHKLEQLRNSCA

SEQ ID NO: 2193 - protein, 263 aa, synthetic construct
  source 1..263: note = HA-mycNLS-TCF4.6-(GS)3-RNF125.2-(GS)3-OMOMYC
MYPYDVPDYAPAAKRVKLDGSGSGSDDLGANDELISFRDEGEQEEAERDLADVKSSLVNESETGSGSGSTSFDCAVCLEVLHQPVRTRCGHVFCRSCIATSLKNNKWTCPYCRAYLPSEGVPATDVAKRMKSEYKNCAECDTLVCLSEMRAHIRTCQKYIDKYGPGSGSGSSDTEENVKRRTHNVLERQRRNELKRSFFALRDQIPELENNEKAPKVVILKKATAYILSVQAETQKLISEIDLLRKQNEQLKHKLEQLRNSCA

SEQ ID NO: 2194 - protein, 270 aa, synthetic construct
  source 1..270: note = HA-mycNLS-TCF4.7-(GS)3-RNF125.2-(GS)3-OMOMYC
MYPYDVPDYAPAAKRVKLDGSGSGSDDLGANDELISFRDEGEQEERSSENSSAERDLADVRSSLVNESETGSGSGSTSFDCAVCLEVLHQPVRTRCGHVFCRSCIATSLKNNKWTCPYCRAYLPSEGVPATDVAKRMKSEYKNCAECDTLVCLSEMRAHIRTCQKYIDKYGPGSGSGSSDTEENVKRRTHNVLERQRRNELKRSFFALRDQIPELENNEKAPKVVILKKATAYILSVQAETQKLISEIDLLRKQNEQLKHKLEQLRNSCA

SEQ ID NO: 2195 - protein, 263 aa, synthetic construct
  source 1..263: note = HA-mycNLS-TCF4.8-(GS)3-RNF125.2-(GS)3-OMOMYC
MYPYDVPDYAPAAKRVKLDGSGSGSDDLGANDELISFRDEGEQEEAERDLADVRSSLVNESETGSGSGSTSFDCAVCLEVLHQPVRTRCGHVFCRSCIATSLKNNKWTCPYCRAYLPSEGVPATDVAKRMKSEYKNCAECDTLVCLSEMRAHIRTCQKYIDKYGPGSGSGSSDTEENVKRRTHNVLERQRRNELKRSFFALRDQIPELENNEKAPKVVILKKATAYILSVQAETQKLISEIDLLRKQNEQLKHKLEQLRNSCA

SEQ ID NO: 2196 - protein, 264 aa, synthetic construct
  source 1..264: note = HA-mycNLS-TCF4.1-RNF125.2-(GS)3-OMOMYC
MYPYDVPDYAPAAKRVKLDGSGSGSDDLGANDELISFKDEGEQEEKSSENSSAERDLADVKSSLVNESETTSFDCAVCLEVLHQPVRTRCGHVFCRSCIATSLKNNKWTCPYCRAYLPSEGVPATDVAKRMKSEYKNCAECDTLVCLSEMRAHIRTCQKYIDKYGPGSGSGSSDTEENVKRRTHNVLERQRRNELKRSFFALRDQIPELENNEKAPKVVILKKATAYILSVQAETQKLISEIDLLRKQNEQLKHKLEQLRNSCA

SEQ ID NO: 2197 - protein, 268 aa, synthetic construct
  source 1..268: note = HA-mycNLS-TCF4.1-GGGS-RNF125.2-(GS)3-OMOMYC
MYPYDVPDYAPAAKRVKLDGSGSGSDDLGANDELISFKDEGEQEEKSSENSSAERDLADVKSSLVNESETGGGSTSFDCAVCLEVLHQPVRTRCGHVFCRSCIATSLKNNKWTCPYCRAYLPSEGVPATDVAKRMKSEYKNCAECDTLVCLSEMRAHIRTCQKYIDKYGPGSGSGSSDTEENVKRRTHNVLERQRRNELKRSFFALRDQIPELENNEKAPKVVILKKATAYILSVQAETQKLISEIDLLRKQNEQLKHKLEQLRNSCA

SEQ ID NO: 2198 - protein, 272 aa, synthetic construct
  source 1..272: note = HA-mycNLS-TCF4.1-(GGGS)2-RNF125.2-(GS)3-OMOMYC
MYPYDVPDYAPAAKRVKLDGSGSGSDDLGANDELISFKDEGEQEEKSSENSSAERDLADVKSSLVNESETGGGSGGGSTSFDCAVCLEVLHQPVRTRCGHVFCRSCIATSLKNNKWTCPYCRAYLPSEGVPATDVAKRMKSEYKNCAECDTLVCLSEMRAHIRTCQKYIDKYGPGSGSGSSDTEENVKRRTHNVLERQRRNELKRSFFALRDQIPELENNEKAPKVVILKKATAYILSVQAETQKLISEIDLLRKQNEQLKHKLEQLRNSCA

SEQ ID NO: 2199 - protein, 276 aa, synthetic construct
  source 1..276: note = HA-mycNLS-TCF4.1-(GGGS)3-RNF125.2-(GS)3-OMOMYC
MYPYDVPDYAPAAKRVKLDGSGSGSDDLGANDELISFKDEGEQEEKSSENSSAERDLADVKSSLVNESETGGGSGGGSGGGSTSFDCAVCLEVLHQPVRTRCGHVFCRSCIATSLKNNKWTCPYCRAYLPSEGVPATDVAKRMKSEYKNCAECDTLVCLSEMRAHIRTCQKYIDKYGPGSGSGSSDTEENVKRRTHNVLERQRRNELKRSFFALRDQIPELENNEKAPKVVILKKATAYILSVQAETQKLISEIDLLRKQNEQLKHKLEQLRNSCA

SEQ ID NO: 2200 - protein, 270 aa, synthetic construct
  source 1..270: note = HA-mycNLS-TCF4-(GS)3-RNF125.2-(GS)3-OMOMYC
MYPYDVPDYAPAAKRVKLDGSGSGSDDLGANDELISFKDEGEQEEKSSENSSAERDLADVKSSLVNESETGSGSGSTSFDCAVCLEVLHQPVRTRCGHVFCRSCIATSLKNNKWTCPYCRAYLPSEGVPATDVAKRMKSEYKNCAECDTLVCLSEMRAHIRTCQKYIDKYGPGSGSGSSDTEENVKRRTHNVLERQRRNELKRSFFALRDQIPELENNEKAPKVVILKKATAYILSVQAETQKLISEIDLLRKQNEQLKHKLEQLRNSCA

SEQ ID NO: 2201 - protein, 270 aa, synthetic construct
  source 1..270: note = HA-mycNLS-OMOMYC-(GS)3-RNF125.2-(GS)3-TCF4
MYPYDVPDYAPAAKRVKLDGSGSGSSDTEENVKRRTHNVLERQRRNELKRSFFALRDQIPELENNEKAPKVVILKKATAYILSVQAETQKLISEIDLLRKQNEQLKHKLEQLRNSCAGSGSGSTSFDCAVCLEVLHQPVRTRCGHVFCRSCIATSLKNNKWTCPYCRAYLPSEGVPATDVAKRMKSEYKNCAECDTLVCLSEMRAHIRTCQKYIDKYGPGSGSGSDDLGANDELISFKDEGEQEEKSSENSSAERDLADVKSSLVNESET

SEQ ID NO: 2202 - protein, 194 aa, synthetic construct
  source 1..194: note = con1.1-(GS)3-RNF125.2-(GS)3-TCF4.1-mycNLS-HA
MSAVLQKKITDYFHPKKGSGSGSTSFDCAVCLEVLHQPVRTRCGHVFCRSCIATSLKNNKWTCPYCRAYLPSEGVPATDVAKRMKSEYKNCAECDTLVCLSEMRAHIRTCQKYIDKYGPGSGSGSDDLGANDELISFKDEGEQEEKSSENSSAERDLADVKSSLVNESETGSGSGSPAAKRVKLDYPYDVPDYA

SEQ ID NO: 2203 - protein, 194 aa, synthetic construct
  source 1..194: note = HA-mycNLS-TCF4.1-(GS)3-RNF125.2-(GS)3-con1.1
MYPYDVPDYAPAAKRVKLDGSGSGSDDLGANDELISFKDEGEQEEKSSENSSAERDLADVKSSLVNESETGSGSGSTSFDCAVCLEVLHQPVRTRCGHVFCRSCIATSLKNNKWTCPYCRAYLPSEGVPATDVAKRMKSEYKNCAECDTLVCLSEMRAHIRTCQKYIDKYGPGSGSGSSAVLQKKITDYFHPKK

SEQ ID NO: 2204 - protein, 285 aa, synthetic construct
  source 1..285: note = con1.1-SPOP.2-TCF4.1-HA
MSAVLQKKITDYFHPKKSVNISGQNTMNMVKVPECRLADELGGLWENSRFTDCCLCVAGQEFQAHKAILAARSPVFSAMFEHEMEESKKNRVEINDVEPEVFKEMMCFIYTGKAPNLDKMADDLLAAADKYALERLKVMCEDALCSNLSVENAAEILILADLHSADQLKTQAVDFINYHASDVLETSGWKSMVVSHPHLVAEAYRSLASAQCPFLGPPRKRLKQSDDLGANDELISFKDEGEQEEKSSENSSAERDLADVKSSLVNESETGSGSGSYPYDVPDYA

SEQ ID NO: 2205 - protein, 285 aa, synthetic construct
  source 1..285: note = HA-TCF4.1-SPOP.2-con1.1
MYPYDVPDYAGSGSGSDDLGANDELISFKDEGEQEEKSSENSSAERDLADVKSSLVNESETSVNISGQNTMNMVKVPECRLADELGGLWENSRFTDCCLCVAGQEFQAHKAILAARSPVFSAMFEHEMEESKKNRVEINDVEPEVFKEMMCFIYTGKAPNLDKMADDLLAAADKYALERLKVMCEDALCSNLSVENAAEILILADLHSADQLKTQAVDFINYHASDVLETSGWKSMVVSHPHLVAEAYRSLASAQCPFLGPPRKRLKQSSAVLQKKITDYFHPKK

SEQ ID NO: 2206 - protein, 133 aa, synthetic construct
  source 1..133: note = con1.1-(GS)3-DCAF1.1-(GS)3-TCF4.1-mycNLS-HA
MSAVLQKKITDYFHPKKGSGSGSQAPINFTSRLNRRASFPKYGGVDGGCFDRHLIFSRGSGSGSDDLGANDELISFKDEGEQEEKSSENSSAERDLADVKSSLVNESETGSGSGSPAAKRVKLDYPYDVPDYA

SEQ ID NO: 2207 - protein, 133 aa, synthetic construct
  source 1..133: note = HA-mycNLS-TCF4.1-(GS)3-DCAF1.1-(GS)3-con1.1
MYPYDVPDYAPAAKRVKLDGSGSGSDDLGANDELISFKDEGEQEEKSSENSSAERDLADVKSSLVNESETGSGSGSQAPINFTSRLNRRASFPKYGGVDGGCFDRHLIFSRGSGSGSSAVLQKKITDYFHPKK

SEQ ID NO: 2208 - skipped

SEQ ID NO: 2209 - protein, 188 aa, synthetic construct
  source 1..188: note = HA-mycNLS-TCF4.1-(GS)3-RNF125.2-con1.1
MYPYDVPDYAPAAKRVKLDGSGSGSDDLGANDELISFKDEGEQEEKSSENSSAERDLADVKSSLVNESETGSGSGSTSFDCAVCLEVLHQPVRTRCGHVFCRSCIATSLKNNKWTCPYCRAYLPSEGVPATDVAKRMKSEYKNCAECDTLVCLSEMRAHIRTCQKYIDKYGPSAVLQKKITDYFHPKK

SEQ ID NO: 2210 - protein, 192 aa, synthetic construct
  source 1..192: note = HA-mycNLS-TCF4.1-(GS)3-RNF125.2-GGGS-con1.1
MYPYDVPDYAPAAKRVKLDGSGSGSDDLGANDELISFKDEGEQEEKSSENSSAERDLADVKSSLVNESETGSGSGSTSFDCAVCLEVLHQPVRTRCGHVFCRSCIATSLKNNKWTCPYCRAYLPSEGVPATDVAKRMKSEYKNCAECDTLVCLSEMRAHIRTCQKYIDKYGPGGGSSAVLQKKITDYFHPKK

SEQ ID NO: 2211 - protein, 196 aa, synthetic construct
  source 1..196: note = HA-mycNLS-TCF4.1-(GS)3-RNF125.2-(GGGS)2-con1.1
MYPYDVPDYAPAAKRVKLDGSGSGSDDLGANDELISFKDEGEQEEKSSENSSAERDLADVKSSLVNESETGSGSGSTSFDCAVCLEVLHQPVRTRCGHVFCRSCIATSLKNNKWTCPYCRAYLPSEGVPATDVAKRMKSEYKNCAECDTLVCLSEMRAHIRTCQKYIDKYGPGGGSGGGSSAVLQKKITDYFHPKK

SEQ ID NO: 2212 - protein, 200 aa, synthetic construct
  source 1..200: note = HA-mycNLS-TCF4.1-(GS)3-RNF125.2-(GGGS)3-con1.1
MYPYDVPDYAPAAKRVKLDGSGSGSDDLGANDELISFKDEGEQEEKSSENSSAERDLADVKSSLVNESETGSGSGSTSFDCAVCLEVLHQPVRTRCGHVFCRSCIATSLKNNKWTCPYCRAYLPSEGVPATDVAKRMKSEYKNCAECDTLVCLSEMRAHIRTCQKYIDKYGPGGGSGGGSGGGSSAVLQKKITDYFHPKK

SEQ ID NO: 2213 - protein, 185 aa, synthetic construct
  source 1..185: note = HA-TCF4.1-(GS)3-RNF125.2-(GS)3-con1.1
MYPYDVPDYAGSGSGSDDLGANDELISFKDEGEQEEKSSENSSAERDLADVKSSLVNESETGSGSGSTSFDCAVCLEVLHQPVRTRCGHVFCRSCIATSLKNNKWTCPYCRAYLPSEGVPATDVAKRMKSEYKNCAECDTLVCLSEMRAHIRTCQKYIDKYGPGSGSGSSAVLQKKITDYFHPKK

SEQ ID NO: 2214 - protein, 209 aa, synthetic construct
  source 1..209: note = HA-mycNLS-TCF4.1-(GS)3-RNF125.2-(GS)3-con1.1-mycNLS
MYPYDVPDYAPAAKRVKLDGSGSGSDDLGANDELISFKDEGEQEEKSSENSSAERDLADVKSSLVNESETGSGSGSTSFDCAVCLEVLHQPVRTRCGHVFCRSCIATSLKNNKWTCPYCRAYLPSEGVPATDVAKRMKSEYKNCAECDTLVCLSEMRAHIRTCQKYIDKYGPGSGSGSSAVLQKKITDYFHPKKGGGSGSPAAKRVKLD

SEQ ID NO: 2215 - protein, 227 aa, synthetic construct
  source 1..227: note = HA-mycNLS-TCF4.1-(GS)3-RNF125.2-(GS)3-con1.1-3xmycNLS
MYPYDVPDYAPAAKRVKLDGSGSGSDDLGANDELISFKDEGEQEEKSSENSSAERDLADVKSSLVNESETGSGSGSTSFDCAVCLEVLHQPVRTRCGHVFCRSCIATSLKNNKWTCPYCRAYLPSEGVPATDVAKRMKSEYKNCAECDTLVCLSEMRAHIRTCQKYIDKYGPGSGSGSSAVLQKKITDYFHPKKGGGSGSPAAKRVKLDPAAKRVKLDPAAKRVKLD

SEQ ID NO: 2216 - protein, 207 aa, synthetic construct
  source 1..207: note = HA-mycNLS-TCF4.1-(GS)3-RNF125.2-(GS)3-con1.1-svNLS
MYPYDVPDYAPAAKRVKLDGSGSGSDDLGANDELISFKDEGEQEEKSSENSSAERDLADVKSSLVNESETGSGSGSTSFDCAVCLEVLHQPVRTRCGHVFCRSCIATSLKNNKWTCPYCRAYLPSEGVPATDVAKRMKSEYKNCAECDTLVCLSEMRAHIRTCQKYIDKYGPGSGSGSSAVLQKKITDYFHPKKGGGSGSPKKKRKV

SEQ ID NO: 2217 - protein, 223 aa, synthetic construct
  source 1..223: note = HA-mycNLS-TCF4.1-(GS)3-RNF125.2-(GS)3-con1.1-3xsvNLS
MYPYDVPDYAPAAKRVKLDGSGSGSDDLGANDELISFKDEGEQEEKSSENSSAERDLADVKSSLVNESETGSGSGSTSFDCAVCLEVLHQPVRTRCGHVFCRSCIATSLKNNKWTCPYCRAYLPSEGVPATDVAKRMKSEYKNCAECDTLVCLSEMRAHIRTCQKYIDKYGPGSGSGSSAVLQKKITDYFHPKKGGGSGSPKKKRKVQPKKKRKVQPKKKRKV

SEQ ID NO: 2218 - protein, 220 aa, synthetic construct
  source 1..220: note = HA-mycNLS-TCF4.1-(GS)3-RNF125.2-(GS)3-con1.1-nlpNLS
MYPYDVPDYAPAAKRVKLDGSGSGSDDLGANDELISFKDEGEQEEKSSENSSAERDLADVKSSLVNESETGSGSGSTSFDCAVCLEVLHQPVRTRCGHVFCRSCIATSLKNNKWTCPYCRAYLPSEGVPATDVAKRMKSEYKNCAECDTLVCLSEMRAHIRTCQKYIDKYGPGSGSGSSAVLQKKITDYFHPKKGGGSGSAVKRPAATKKAGQAKKKKLD

SEQ ID NO: 2219 - protein, 221 aa, synthetic construct
  source 1..221: note = HA-mycNLS-TCF4.1-(GS)3-RNF125.2-(GS)3-con1.1-bpNLS
MYPYDVPDYAPAAKRVKLDGSGSGSDDLGANDELISFKDEGEQEEKSSENSSAERDLADVKSSLVNESETGSGSGSTSFDCAVCLEVLHQPVRTRCGHVFCRSCIATSLKNNKWTCPYCRAYLPSEGVPATDVAKRMKSEYKNCAECDTLVCLSEMRAHIRTCQKYIDKYGPGSGSGSSAVLQKKITDYFHPKKGSGSGSGKRKLITSEEERSPAKRGRKS

SEQ ID NO: 2220 - protein, 227 aa, synthetic construct
  source 1..227: note = HA-mycNLS-TCF4.1-(GS)3-RNF125.2-(GS)3-con1.1-hrpNLS
MYPYDVPDYAPAAKRVKLDGSGSGSDDLGANDELISFKDEGEQEEKSSENSSAERDLADVKSSLVNESETGSGSGSTSFDCAVCLEVLHQPVRTRCGHVFCRSCIATSLKNNKWTCPYCRAYLPSEGVPATDVAKRMKSEYKNCAECDTLVCLSEMRAHIRTCQKYIDKYGPGSGSGSSAVLQKKITDYFHPKKGGGSGSRSGGNHRRNGRGGRGGYNRRNNGYHPY

SEQ ID NO: 2221 - protein, 213 aa, synthetic construct
  source 1..213: note = HA-mycNLS-TCF4.1-(GS)3-RNF125.2-(GS)3-con1.1-spNLS
MYPYDVPDYAPAAKRVKLDGSGSGSDDLGANDELISFKDEGEQEEKSSENSSAERDLADVKSSLVNESETGSGSGSTSFDCAVCLEVLHQPVRTRCGHVFCRSCIATSLKNNKWTCPYCRAYLPSEGVPATDVAKRMKSEYKNCAECDTLVCLSEMRAHIRTCQKYIDKYGPGSGSGSSAVLQKKITDYFHPKKGGGSGSPFLGPPRKRLKQS

SEQ ID NO: 2222 - protein, 285 aa, synthetic construct
  source 1..285: note = HA-con1.1-SPOP.3-(GGGS)3GS-TCF4.1
MYPYDVPDYAGGGSGSSAVLQKKITDYFHPKKSVNISGQNTMNMVKVPECRLADELGGLWENSRFTDCCLCVAGQEFQAHKAILAARSPVFSAMFEHEMEESKKNRVEINDVEPEVFKEMMCFIYTGKAPNLDKMADDLLAAADKYALERLKVMCEDALCSNLSVENAAEILILADLHSADQLKTQAVDFINYHASDVLETSGWKSMVVSHPHLVAEAYRSLASAQGGGSGGGSGGGSGSDDLGANDELISFKDEGEQEEKSSENSSAERDLADVKSSLVNESET

SEQ ID NO: 2223 - protein, 289 aa, synthetic construct
  source 1..289: note = HA-con1.1-SPOP.2-GGGS-TCF4.1
MYPYDVPDYAGGGSGSSAVLQKKITDYFHPKKSVNISGQNTMNMVKVPECRLADELGGLWENSRFTDCCLCVAGQEFQAHKAILAARSPVFSAMFEHEMEESKKNRVEINDVEPEVFKEMMCFIYTGKAPNLDKMADDLLAAADKYALERLKVMCEDALCSNLSVENAAEILILADLHSADQLKTQAVDFINYHASDVLETSGWKSMVVSHPHLVAEAYRSLASAQCPFLGPPRKRLKQSGGGSDDLGANDELISFKDEGEQEEKSSENSSAERDLADVKSSLVNESET

SEQ ID NO: 2224 - protein, 293 aa, synthetic construct
  source 1..293: note = HA-con1.1-SPOP.2-(GGGS)2-TCF4.1
MYPYDVPDYAGGGSGSSAVLQKKITDYFHPKKSVNISGQNTMNMVKVPECRLADELGGLWENSRFTDCCLCVAGQEFQAHKAILAARSPVFSAMFEHEMEESKKNRVEINDVEPEVFKEMMCFIYTGKAPNLDKMADDLLAAADKYALERLKVMCEDALCSNLSVENAAEILILADLHSADQLKTQAVDFINYHASDVLETSGWKSMVVSHPHLVAEAYRSLASAQCPFLGPPRKRLKQSGGGSGGGSDDLGANDELISFKDEGEQEEKSSENSSAERDLADVKSSLVNESET

SEQ ID NO: 2225 - protein, 188 aa, synthetic construct
  source 1..188: note = HA-mycNLS-TCF4.1-RNF125.2-(GS)3-con1.1
MYPYDVPDYAPAAKRVKLDGSGSGSDDLGANDELISFKDEGEQEEKSSENSSAERDLADVKSSLVNESETTSFDCAVCLEVLHQPVRTRCGHVFCRSCIATSLKNNKWTCPYCRAYLPSEGVPATDVAKRMKSEYKNCAECDTLVCLSEMRAHIRTCQKYIDKYGPGSGSGSSAVLQKKITDYFHPKK

SEQ ID NO: 2226 - protein, 192 aa, synthetic construct
  source 1..192: note = HA-mycNLS-TCF4.1-GGGS-RNF125.2-(GS)3-con1.1
MYPYDVPDYAPAAKRVKLDGSGSGSDDLGANDELISFKDEGEQEEKSSENSSAERDLADVKSSLVNESETGGGSTSFDCAVCLEVLHQPVRTRCGHVFCRSCIATSLKNNKWTCPYCRAYLPSEGVPATDVAKRMKSEYKNCAECDTLVCLSEMRAHIRTCQKYIDKYGPGSGSGSSAVLQKKITDYFHPKK

SEQ ID NO: 2227 - protein, 196 aa, synthetic construct
  source 1..196: note = HA-mycNLS-TCF4.1-(GGGS)2-RNF125.2-(GS)3-con1.1
MYPYDVPDYAPAAKRVKLDGSGSGSDDLGANDELISFKDEGEQEEKSSENSSAERDLADVKSSLVNESETGGGSGGGSTSFDCAVCLEVLHQPVRTRCGHVFCRSCIATSLKNNKWTCPYCRAYLPSEGVPATDVAKRMKSEYKNCAECDTLVCLSEMRAHIRTCQKYIDKYGPGSGSGSSAVLQKKITDYFHPKK

SEQ ID NO: 2228 - protein, 200 aa, synthetic construct
  source 1..200: note = HA-mycNLS-TCF4.1-(GGGS)3-RNF125.2-(GS)3-con1.1
MYPYDVPDYAPAAKRVKLDGSGSGSDDLGANDELISFKDEGEQEEKSSENSSAERDLADVKSSLVNESETGGGSGGGSGGGSTSFDCAVCLEVLHQPVRTRCGHVFCRSCIATSLKNNKWTCPYCRAYLPSEGVPATDVAKRMKSEYKNCAECDTLVCLSEMRAHIRTCQKYIDKYGPGSGSGSSAVLQKKITDYFHPKK

SEQ ID NO: 2229 - protein, 187 aa, synthetic construct
  source 1..187: note = HA-mycNLS-TCF4.2-(GS)3-RNF125.2-(GS)3-con1.1
MYPYDVPDYAPAAKRVKLDGSGSGSDDLGANDELISFKDEGEQEEAERDLADVKSSLVNESETGSGSGSTSFDCAVCLEVLHQPVRTRCGHVFCRSCIATSLKNNKWTCPYCRAYLPSEGVPATDVAKRMKSEYKNCAECDTLVCLSEMRAHIRTCQKYIDKYGPGSGSGSSAVLQKKITDYFHPKK

SEQ ID NO: 2230 - protein, 194 aa, synthetic construct
  source 1..194: note = HA-mycNLS-TCF4.3-(GS)3-RNF125.2-(GS)3-con1.1
MYPYDVPDYAPAAKRVKLDGSGSGSDDLGANDELISFKDEGEQEEKSSENSSAERDLADVRSSLVNESETGSGSGSTSFDCAVCLEVLHQPVRTRCGHVFCRSCIATSLKNNKWTCPYCRAYLPSEGVPATDVAKRMKSEYKNCAECDTLVCLSEMRAHIRTCQKYIDKYGPGSGSGSSAVLQKKITDYFHPKK

SEQ ID NO: 2231 - protein, 187 aa, synthetic construct
  source 1..187: note = HA-mycNLS-TCF4.4-(GS)3-RNF125.2-(GS)3-con1.1
MYPYDVPDYAPAAKRVKLDGSGSGSDDLGANDELISFKDEGEQEEAERDLADVRSSLVNESETGSGSGSTSFDCAVCLEVLHQPVRTRCGHVFCRSCIATSLKNNKWTCPYCRAYLPSEGVPATDVAKRMKSEYKNCAECDTLVCLSEMRAHIRTCQKYIDKYGPGSGSGSSAVLQKKITDYFHPKK

SEQ ID NO: 2232 - protein, 194 aa, synthetic construct
  source 1..194: note = HA-mycNLS-TCF4.5-(GS)3-RNF125.2-(GS)3-con1.1
MYPYDVPDYAPAAKRVKLDGSGSGSDDLGANDELISFRDEGEQEERSSENSSAERDLADVKSSLVNESETGSGSGSTSFDCAVCLEVLHQPVRTRCGHVFCRSCIATSLKNNKWTCPYCRAYLPSEGVPATDVAKRMKSEYKNCAECDTLVCLSEMRAHIRTCQKYIDKYGPGSGSGSSAVLQKKITDYFHPKK

SEQ ID NO: 2233 - protein, 187 aa, synthetic construct
  source 1..187: note = HA-mycNLS-TCF4.6-(GS)3-RNF125.2-(GS)3-con1.1
MYPYDVPDYAPAAKRVKLDGSGSGSDDLGANDELISFRDEGEQEEAERDLADVKSSLVNESETGSGSGSTSFDCAVCLEVLHQPVRTRCGHVFCRSCIATSLKNNKWTCPYCRAYLPSEGVPATDVAKRMKSEYKNCAECDTLVCLSEMRAHIRTCQKYIDKYGPGSGSGSSAVLQKKITDYFHPKK

SEQ ID NO: 2234 - protein, 194 aa, synthetic construct
  source 1..194: note = HA-mycNLS-TCF4.7-(GS)3-RNF125.2-(GS)3-con1.1
MYPYDVPDYAPAAKRVKLDGSGSGSDDLGANDELISFRDEGEQEERSSENSSAERDLADVRSSLVNESETGSGSGSTSFDCAVCLEVLHQPVRTRCGHVFCRSCIATSLKNNKWTCPYCRAYLPSEGVPATDVAKRMKSEYKNCAECDTLVCLSEMRAHIRTCQKYIDKYGPGSGSGSSAVLQKKITDYFHPKK

SEQ ID NO: 2235 - protein, 187 aa, synthetic construct
  source 1..187: note = HA-mycNLS-TCF4.8-(GS)3-RNF125.2-(GS)3-con1.1
MYPYDVPDYAPAAKRVKLDGSGSGSDDLGANDELISFRDEGEQEEAERDLADVRSSLVNESETGSGSGSTSFDCAVCLEVLHQPVRTRCGHVFCRSCIATSLKNNKWTCPYCRAYLPSEGVPATDVAKRMKSEYKNCAECDTLVCLSEMRAHIRTCQKYIDKYGPGSGSGSSAVLQKKITDYFHPKK

SEQ ID NO: 2236 - protein, 183 aa, synthetic construct
  source 1..183: note = HA-mycNLS-TCF4.1-(GS)1-NHLRC1.1-(GS)1-con1.1
MGYPYDVPDYAPAAKRVKLDGSGSGSDDLGANDELISFKDEGEQEEKSSENSSAERDLADVKSSLVNESETGSESGPALHELMREAEISLLECKVCFEKFGHRQQRRPRNLSCGHVVCLACVAALAHPRTLALECPFCRRACRGCDTSDCLPVLHLIELLGSALRGSSAVLQKKITDYFHPKK

SEQ ID NO: 2237 - protein, 193 aa, synthetic construct
  source 1..193: note = HA-mycNLS-TCF4.1-(GS)1-NHLRC1.1-(GS)6-con1.1
MGYPYDVPDYAPAAKRVKLDGSGSGSDDLGANDELISFKDEGEQEEKSSENSSAERDLADVKSSLVNESETGSESGPALHELMREAEISLLECKVCFEKFGHRQQRRPRNLSCGHVVCLACVAALAHPRTLALECPFCRRACRGCDTSDCLPVLHLIELLGSALRGSGSGSGSGSGSSAVLQKKITDYFHPKK

SEQ ID NO: 2238 - protein, 193 aa, synthetic construct
  source 1..193: note = HA-mycNLS-con1.1-(GS)1-NHLRC1.1-(GS)6-TCF4.1
MGYPYDVPDYAPAAKRVKLDGSGSGSSAVLQKKITDYFHPKKGSESGPALHELMREAEISLLECKVCFEKFGHRQQRRPRNLSCGHVVCLACVAALAHPRTLALECPFCRRACRGCDTSDCLPVLHLIELLGSALRGSGSGSGSGSGSDDLGANDELISFKDEGEQEEKSSENSSAERDLADVKSSLVNESET

SEQ ID NO: 2239 - protein, 203 aa, synthetic construct
  source 1..203: note = HA-mycNLS-con1.1-(GS)6-NHLRC1.1-(GS)6-TCF4.1
MGYPYDVPDYAPAAKRVKLDGSGSGSSAVLQKKITDYFHPKKGSGSGSGSGSGSESGPALHELMREAEISLLECKVCFEKFGHRQQRRPRNLSCGHVVCLACVAALAHPRTLALECPFCRRACRGCDTSDCLPVLHLIELLGSALRGSGSGSGSGSGSDDLGANDELISFKDEGEQEEKSSENSSAERDLADVKSSLVNESET

SEQ ID NO: 2240 - protein, 181 aa, synthetic construct
  source 1..181: note = HA-mycNLS-TCF4.1-con1.1-(GS)1-NHLRC1.1
MGYPYDVPDYAPAAKRVKLDGSGSGSDDLGANDELISFKDEGEQEEKSSENSSAERDLADVKSSLVNESETSAVLQKKITDYFHPKKGSESGPALHELMREAEISLLECKVCFEKFGHRQQRRPRNLSCGHVVCLACVAALAHPRTLALECPFCRRACRGCDTSDCLPVLHLIELLGSALR

SEQ ID NO: 2241 - protein, 191 aa, synthetic construct
  source 1..191: note = HA-mycNLS-TCF4.1-con1.1-(GS)6-NHLRC1.1
MGYPYDVPDYAPAAKRVKLDGSGSGSDDLGANDELISFKDEGEQEEKSSENSSAERDLADVKSSLVNESETSAVLQKKITDYFHPKKGSGSGSGSGSGSESGPALHELMREAEISLLECKVCFEKFGHRQQRRPRNLSCGHVVCLACVAALAHPRTLALECPFCRRACRGCDTSDCLPVLHLIELLGSALR

SEQ ID NO: 2242 - protein, 181 aa, synthetic construct
  source 1..181: note = HA-mycNLS-NHLRC1.1-(GS)1-con1.1-TCF4.1
MGYPYDVPDYAPAAKRVKLDGSGSGSESGPALHELMREAEISLLECKVCFEKFGHRQQRRPRNLSCGHVVCLACVAALAHPRTLALECPFCRRACRGCDTSDCLPVLHLIELLGSALRGSSAVLQKKITDYFHPKKDDLGANDELISFKDEGEQEEKSSENSSAERDLADVKSSLVNESET

SEQ ID NO: 2243 - protein, 191 aa, synthetic construct
  source 1..191: note = HA-mycNLS-NHLRC1.1-(GS)6-con1.1-TCF4.1
MGYPYDVPDYAPAAKRVKLDGSGSGSESGPALHELMREAEISLLECKVCFEKFGHRQQRRPRNLSCGHVVCLACVAALAHPRTLALECPFCRRACRGCDTSDCLPVLHLIELLGSALRGSGSGSGSGSGSSAVLQKKITDYFHPKKDDLGANDELISFKDEGEQEEKSSENSSAERDLADVKSSLVNESET

SEQ ID NO: 2244 - protein, 181 aa, synthetic construct
  source 1..181: note = HA-mycNLS-con1.1-TCF4.1-(GS)1-NHLRC1.1
MGYPYDVPDYAPAAKRVKLDGSGSGSSAVLQKKITDYFHPKKDDLGANDELISFKDEGEQEEKSSENSSAERDLADVKSSLVNESETGSESGPALHELMREAEISLLECKVCFEKFGHRQQRRPRNLSCGHVVCLACVAALAHPRTLALECPFCRRACRGCDTSDCLPVLHLIELLGSALR

SEQ ID NO: 2245 - protein, 191 aa, synthetic construct
  source 1..191: note = HA-mycNLS-NHLRC1.1-(GS)6-TCF4.1-con1.1
MGYPYDVPDYAPAAKRVKLDGSGSGSESGPALHELMREAEISLLECKVCFEKFGHRQQRRPRNLSCGHVVCLACVAALAHPRTLALECPFCRRACRGCDTSDCLPVLHLIELLGSALRGSGSGSGSGSGSDDLGANDELISFKDEGEQEEKSSENSSAERDLADVKSSLVNESETSAVLQKKITDYFHPKK

SEQ ID NO: 2246 - protein, 221 aa, synthetic construct
  source 1..221: note = HA-mycNLS-TCF4.2-(GS)3-RNF125.2-(GS)3-con1.1-hrpNLS
MGYPYDVPDYAPAAKRVKLDGSGSGSDDLGANDELISFKDEGEQEEAERDLADVKSSLVNESETGSGSGSTSFDCAVCLEVLHQPVRTRCGHVFCRSCIATSLKNNKWTCPYCRAYLPSEGVPATDVAKRMKSEYKNCAECDTLVCLSEMRAHIRTCQKYIDKYGPGSGSGSSAVLQKKITDYFHPKKGGGSGSRSGGNHRRNGRGGRGGYNRRNNGYHPY

SEQ ID NO: 2247 - protein, 228 aa, synthetic construct
  source 1..228: note = HA-mycNLS-TCF4.1-(GS)3-RNF125.2-(GS)3-con1.2-hrpNLS
MGYPYDVPDYAPAAKRVKLDGSGSGSDDLGANDELISFKDEGEQEEKSSENSSAERDLADVKSSLVNESETGSGSGSTSFDCAVCLEVLHQPVRTRCGHVFCRSCIATSLKNNKWTCPYCRAYLPSEGVPATDVAKRMKSEYKNCAECDTLVCLSEMRAHIRTCQKYIDKYGPGSGSGSSAVLMKKRTDYRHPKKGGGSGSRSGGNHRRNGRGGRGGYNRRNNGYHPY

SEQ ID NO: 2248 - protein, 221 aa, synthetic construct
  source 1..221: note = HA-mycNLS-TCF4.2-(GS)3-RNF125.2-(GS)3-con1.2-hrpNLS
MGYPYDVPDYAPAAKRVKLDGSGSGSDDLGANDELISFKDEGEQEEAERDLADVKSSLVNESETGSGSGSTSFDCAVCLEVLHQPVRTRCGHVFCRSCIATSLKNNKWTCPYCRAYLPSEGVPATDVAKRMKSEYKNCAECDTLVCLSEMRAHIRTCQKYIDKYGPGSGSGSSAVLMKKRTDYRHPKKGGGSGSRSGGNHRRNGRGGRGGYNRRNNGYHPY

SEQ ID NO: 2249 - protein, 215 aa, synthetic construct
  source 1..215: note = HA-mycNLS-TCF4.2-con1.1-(GS)3-RNF125.2-hrpNLS
MGYPYDVPDYAPAAKRVKLDGSGSGSDDLGANDELISFKDEGEQEEAERDLADVKSSLVNESETSAVLQKKITDYFHPKKGSGSGSTSFDCAVCLEVLHQPVRTRCGHVFCRSCIATSLKNNKWTCPYCRAYLPSEGVPATDVAKRMKSEYKNCAECDTLVCLSEMRAHIRTCQKYIDKYGPGGGSGSRSGGNHRRNGRGGRGGYNRRNNGYHPY

SEQ ID NO: 2250 - protein, 215 aa, synthetic construct
  source 1..215: note = HA-mycNLS-RNF125.2-(GS)3-con1.1-TCF4.2-hrpNLS
MGYPYDVPDYAPAAKRVKLDGSGSGSTSFDCAVCLEVLHQPVRTRCGHVFCRSCIATSLKNNKWTCPYCRAYLPSEGVPATDVAKRMKSEYKNCAECDTLVCLSEMRAHIRTCQKYIDKYGPGSGSGSSAVLQKKITDYFHPKKDDLGANDELISFKDEGEQEEAERDLADVKSSLVNESETGGGSGSRSGGNHRRNGRGGRGGYNRRNNGYHPY

SEQ ID NO: 2251 - protein, 209 aa, synthetic construct
  source 1..209: note = HA-mycNLS-TCF4.2-con1.1--RNF125.2-hrpNLS
MGYPYDVPDYAPAAKRVKLDGSGSGSDDLGANDELISFKDEGEQEEAERDLADVKSSLVNESETSAVLQKKITDYFHPKKTSFDCAVCLEVLHQPVRTRCGHVFCRSCIATSLKNNKWTCPYCRAYLPSEGVPATDVAKRMKSEYKNCAECDTLVCLSEMRAHIRTCQKYIDKYGPGGGSGSRSGGNHRRNGRGGRGGYNRRNNGYHPY

SEQ ID NO: 2252 - protein, 209 aa, synthetic construct
  source 1..209: note = HA-mycNLS-RNF125.2-con1.1-TCF4.2-hrpNLS
MGYPYDVPDYAPAAKRVKLDGSGSGSTSFDCAVCLEVLHQPVRTRCGHVFCRSCIATSLKNNKWTCPYCRAYLPSEGVPATDVAKRMKSEYKNCAECDTLVCLSEMRAHIRTCQKYIDKYGPSAVLQKKITDYFHPKKDDLGANDELISFKDEGEQEEAERDLADVKSSLVNESETGGGSGSRSGGNHRRNGRGGRGGYNRRNNGYHPY

SEQ ID NO: 2253 - protein, 221 aa, synthetic construct; identical to SEQ ID NO: 2246
  source 1..221: note = HA-mycNLS-TCF4.2-(GS)3-RNF125.4-(GS)3-con1.1-hrpNLS

SEQ ID NO: 2254 - protein, 221 aa, synthetic construct
  source 1..221: note = HA-mycNLS-TCF4.2-(GS)3-RNF125.5-(GS)3-con1.1-hrpNLS
MGYPYDVPDYAPAAKRVKLDGSGSGSDDLGANDELISFKDEGEQEEAERDLADVKSSLVNESETGSGSGSTSFDCAVCLEVLHQPVRTRCGHVFCRSCIATSLKNNKWTCPYCRAYLPSEGVPATDVAKRMKNENKNCAECDTLVCLNEMRAHIRTCQKYIDKYGPGSGSGSSAVLQKKITDYFHPKKGGGSGSRSGGNHRRNGRGGRGGYNRRNNGYHPY

SEQ ID NO: 2255 - protein, 221 aa, synthetic construct
  source 1..221: note = HA-mycNLS-TCF4.2-(GS)3-RNF125.6-(GS)3-con1.1-hrpNLS
MGYPYDVPDYAPAAKRVKLDGSGSGSDDLGANDELISFKDEGEQEEAERDLADVKSSLVNESETGSGSGSTSFDCAVCLEVLHQPVRTRCGHVFCRSCIATSLKNNKWTCPYCRAYLPSEGVPATDVARRMKNENKNCAECDTLVCLNEMRAHIRTCQRYIDKYGPGSGSGSSAVLQKKITDYFHPKKGGGSGSRSGGNHRRNGRGGRGGYNRRNNGYHPY

SEQ ID NO: 2256 - protein, 209 aa, synthetic construct
  source 1..209: note = HA-mycNLS-TCF4.16-RNF125.3-(GS)3-con1.1-hrpNLS
MGYPYDVPDYAPAAKRVKLDGSGSGSDDLGANDELISFRDEGEQEEAERDLADVKSSLVNFDCAVCLEVLHQPVRTRCGHVFCRSCIATSLKNNKWTCPYCRAYLPSEGVPATDVAKRMKSEYKNCAECDTLVCLSEMRAHIRTCQKYIDKYGPGSGSGSSAVLQKKITDYFHPKKGGGSGSRSGGNHRRNGRGGRGGYNRRNNGYHPY

SEQ ID NO: 2257 - protein, 211 aa, synthetic construct
  source 1..211: note = HA-mycNLS-TCF4.16-RNF125.2-(GS)3-con1.1-hrpNLS
MGYPYDVPDYAPAAKRVKLDGSGSGSDDLGANDELISFRDEGEQEEAERDLADVKSSLVNTSFDCAVCLEVLHQPVRTRCGHVFCRSCIATSLKNNKWTCPYCRAYLPSEGVPATDVAKRMKSEYKNCAECDTLVCLSEMRAHIRTCQKYIDKYGPGSGSGSSAVLQKKITDYFHPKKGGGSGSRSGGNHRRNGRGGRGGYNRRNNGYHPY

SEQ ID NO: 2258 - protein, 213 aa, synthetic construct
  source 1..213: note = HA-mycNLS-TCF4.16-(GS)1-RNF125.2-(GS)3-con1.1-hrpNLS
MGYPYDVPDYAPAAKRVKLDGSGSGSDDLGANDELISFRDEGEQEEAERDLADVKSSLVNGSTSFDCAVCLEVLHQPVRTRCGHVFCRSCIATSLKNNKWTCPYCRAYLPSEGVPATDVAKRMKSEYKNCAECDTLVCLSEMRAHIRTCQKYIDKYGPGSGSGSSAVLQKKITDYFHPKKGGGSGSRSGGNHRRNGRGGRGGYNRRNNGYHPY

SEQ ID NO: 2259 - protein, 217 aa, synthetic construct
  source 1..217: note = HA-mycNLS-TCF4.16-(GS)3-RNF125.2-(GS)3-con1.1-hrpNLS
MGYPYDVPDYAPAAKRVKLDGSGSGSDDLGANDELISFRDEGEQEEAERDLADVKSSLVNGSGSGSTSFDCAVCLEVLHQPVRTRCGHVFCRSCIATSLKNNKWTCPYCRAYLPSEGVPATDVAKRMKSEYKNCAECDTLVCLSEMRAHIRTCQKYIDKYGPGSGSGSSAVLQKKITDYFHPKKGGGSGSRSGGNHRRNGRGGRGGYNRRNNGYHPY

SEQ ID NO: 2260 - protein, 209 aa, synthetic construct
  source 1..209: note = HA-mycNLS-TCF4.12-RNF125.3-(GS)3-con1.1-hrpNLS
MGYPYDVPDYAPAAKRVKLDGSGSGSDDLGANDELISFKDEGEQEEAERDLADVKSSLVNFDCAVCLEVLHQPVRTRCGHVFCRSCIATSLKNNKWTCPYCRAYLPSEGVPATDVAKRMKSEYKNCAECDTLVCLSEMRAHIRTCQKYIDKYGPGSGSGSSAVLQKKITDYFHPKKGGGSGSRSGGNHRRNGRGGRGGYNRRNNGYHPY

SEQ ID NO: 2261 - protein, 211 aa, synthetic construct
  source 1..211: note = HA-mycNLS-TCF4.12-RNF125.2-(GS)3-con1.1-hrpNLS
MGYPYDVPDYAPAAKRVKLDGSGSGSDDLGANDELISFKDEGEQEEAERDLADVKSSLVNTSFDCAVCLEVLHQPVRTRCGHVFCRSCIATSLKNNKWTCPYCRAYLPSEGVPATDVAKRMKSEYKNCAECDTLVCLSEMRAHIRTCQKYIDKYGPGSGSGSSAVLQKKITDYFHPKKGGGSGSRSGGNHRRNGRGGRGGYNRRNNGYHPY

SEQ ID NO: 2262 - protein, 213 aa, synthetic construct
  source 1..213: note = HA-mycNLS-TCF4.12-(GS)1-RNF125.2-(GS)3-con1.1-hrpNLS
MGYPYDVPDYAPAAKRVKLDGSGSGSDDLGANDELISFKDEGEQEEAERDLADVKSSLVNGSTSFDCAVCLEVLHQPVRTRCGHVFCRSCIATSLKNNKWTCPYCRAYLPSEGVPATDVAKRMKSEYKNCAECDTLVCLSEMRAHIRTCQKYIDKYGPGSGSGSSAVLQKKITDYFHPKKGGGSGSRSGGNHRRNGRGGRGGYNRRNNGYHPY

SEQ ID NO: 2263 - protein, 217 aa, synthetic construct
  source 1..217: note = HA-mycNLS-TCF4.12-(GS)3-RNF125.2-(GS)3-con1.1-hrpNLS
MGYPYDVPDYAPAAKRVKLDGSGSGSDDLGANDELISFKDEGEQEEAERDLADVKSSLVNGSGSGSTSFDCAVCLEVLHQPVRTRCGHVFCRSCIATSLKNNKWTCPYCRAYLPSEGVPATDVAKRMKSEYKNCAECDTLVCLSEMRAHIRTCQKYIDKYGPGSGSGSSAVLQKKITDYFHPKKGGGSGSRSGGNHRRNGRGGRGGYNRRNNGYHPY

SEQ ID NO: 2264 - protein, 215 aa, synthetic construct
  source 1..215: note = HA-mycNLS-RNF125.2-(GS)3-TCF4.2-con1.1-hrpNLS
MGYPYDVPDYAPAAKRVKLDGSGSGSTSFDCAVCLEVLHQPVRTRCGHVFCRSCIATSLKNNKWTCPYCRAYLPSEGVPATDVAKRMKSEYKNCAECDTLVCLSEMRAHIRTCQKYIDKYGPGSGSGSDDLGANDELISFKDEGEQEEAERDLADVKSSLVNESETSAVLQKKITDYFHPKKGGGSGSRSGGNHRRNGRGGRGGYNRRNNGYHPY

SEQ ID NO: 2265 - protein, 215 aa, synthetic construct
  source 1..215: note = HA-mycNLS-con1.1-TCF4.2-(GS)3-RNF125.2-hrpNLS
MGYPYDVPDYAPAAKRVKLDGSGSGSSAVLQKKITDYFHPKKDDLGANDELISFKDEGEQEEAERDLADVKSSLVNESETGSGSGSTSFDCAVCLEVLHQPVRTRCGHVFCRSCIATSLKNNKWTCPYCRAYLPSEGVPATDVAKRMKSEYKNCAECDTLVCLSEMRAHIRTCQKYIDKYGPGGGSGSRSGGNHRRNGRGGRGGYNRRNNGYHPY

SEQ ID NO: 2266 - protein, 174 aa, synthetic construct
  source 1..174: note = HA-mycNLS-con1.1-TCF4.2-(GS)1-NHLRC1.1
MGYPYDVPDYAPAAKRVKLDGSGSGSSAVLQKKITDYFHPKKDDLGANDELISFKDEGEQEEAERDLADVKSSLVNESETGSESGPALHELMREAEISLLECKVCFEKFGHRQQRRPRNLSCGHVVCLACVAALAHPRTLALECPFCRRACRGCDTSDCLPVLHLIELLGSALR

SEQ ID NO: 2267 - protein, 170 aa, synthetic construct
  source 1..170: note = HA-mycNLS-con1.1-TCF4.12-(GS)1-NHLRC1.1
MGYPYDVPDYAPAAKRVKLDGSGSGSSAVLQKKITDYFHPKKDDLGANDELISFKDEGEQEEAERDLADVKSSLVNGSESGPALHELMREAEISLLECKVCFEKFGHRQQRRPRNLSCGHVVCLACVAALAHPRTLALECPFCRRACRGCDTSDCLPVLHLIELLGSALR

SEQ ID NO: 2268 - protein, 217 aa, synthetic construct; identical to SEQ ID NO: 2263
  source 1..217: note = HA-mycNLS-TCF4.12-(GS)3-RNF125.2-(GS)3-con1.1-hrpNLS

SEQ ID NO: 2269 - protein, 184 aa, synthetic construct
  source 1..184: note = HA-mycNLS-con1.1-TCF4.2-(GS)6-NHLRC1.1
MGYPYDVPDYAPAAKRVKLDGSGSGSSAVLQKKITDYFHPKKDDLGANDELISFKDEGEQEEAERDLADVKSSLVNESETGSGSGSGSGSGSESGPALHELMREAEISLLECKVCFEKFGHRQQRRPRNLSCGHVVCLACVAALAHPRTLALECPFCRRACRGCDTSDCLPVLHLIELLGSALR

SEQ ID NO: 2270 - protein, 221 aa, synthetic construct
  source 1..221: note = HA-mycNLS-TCF4.14-(GS)3-RNF125.2-(GS)3-con1.1-hrpNLS
MGYPYDVPDYAPAAKRVKLDGSGSGSDDLGANRELASAKDEGEQEEAERDAADVRSSAVNESETGSGSGSTSFDCAVCLEVLHQPVRTRCGHVFCRSCIATSLKNNKWTCPYCRAYLPSEGVPATDVAKRMKSEYKNCAECDTLVCLSEMRAHIRTCQKYIDKYGPGSGSGSSAVLQKKITDYFHPKKGGGSGSRSGGNHRRNGRGGRGGYNRRNNGYHPY

SEQ ID NO: 2271 - protein, 181 aa, synthetic construct
  source 1..181: note = HA-mycNLS-NHLRC1.1-(GS)1-TCF4.1-con1.1
MGYPYDVPDYAPAAKRVKLDGSGSGSESGPALHELMREAEISLLECKVCFEKFGHRQQRRPRNLSCGHVVCLACVAALAHPRTLALECPFCRRACRGCDTSDCLPVLHLIELLGSALRGSDDLGANDELISFKDEGEQEEKSSENSSAERDLADVKSSLVNESETSAVLQKKITDYFHPKK

SEQ ID NO: 2272 - protein, 218 aa, synthetic construct
  source 1..218: note = mycNLS-TCF4.1-(GS)3-RNF125.2-(GS)3-con1.1-hrpNLS
MPAAKRVKLDGSGSGSDDLGANDELISFKDEGEQEEKSSENSSAERDLADVKSSLVNESETGSGSGSTSFDCAVCLEVLHQPVRTRCGHVFCRSCIATSLKNNKWTCPYCRAYLPSEGVPATDVAKRMKSEYKNCAECDTLVCLSEMRAHIRTCQKYIDKYGPGSGSGSSAVLQKKITDYFHPKKGGGSGSRSGGNHRRNGRGGRGGYNRRNNGYHPY

SEQ ID NO: 2273 - protein, 208 aa, synthetic construct
  source 1..208: note = HA-3xsvNLS-TCF4.1-(GS)3-RNF125.2-(GS)3-p21.1
MGYPYDVPDYAPKKKRKVQPKKKRKVQPKKKRKVGSGSGSDDLGANDELISFKDEGEQEEKSSENSSAERDLADVKSSLVNESETGSGSGSTSFDCAVCLEVLHQPVRTRCGHVFCRSCIATSLKNNKWTCPYCRAYLPSEGVPATDVAKRMKSEYKNCAECDTLVCLSEMRAHIRTCQKYIDKYGPGSGSGSGRRQTSMTDFYHSTR

SEQ ID NO: 2274 - protein, 215 aa, synthetic construct
  source 1..215: note = HA-3xsvNLS-TCF4.1-(GS)3-RNF125.2-(GS)3-p21.2
MGYPYDVPDYAPKKKRKVQPKKKRKVQPKKKRKVGSGSGSDDLGANDELISFKDEGEQEEKSSENSSAERDLADVKSSLVNESETGSGSGSTSFDCAVCLEVLHQPVRTRCGHVFCRSCIATSLKNNKWTCPYCRAYLPSEGVPATDVAKRMKSEYKNCAECDTLVCLSEMRAHIRTCQKYIDKYGPGSGSGSGRGRRQTSMTDYFHSTRRLIFS

SEQ ID NO: 2275 - protein, 208 aa, synthetic construct
  source 1..208: note = HA-3xsvNLS-TCF4.1-(GS)3-RNF125.2-(GS)3-p21.3
MGYPYDVPDYAPKKKRKVQPKKKRKVQPKKKRKVGSGSGSDDLGANDELISFKDEGEQEEKSSENSSAERDLADVKSSLVNESETGSGSGSTSFDCAVCLEVLHQPVRTRCGHVFCRSCIATSLKNNKWTCPYCRAYLPSEGVPATDVAKRMKSEYKNCAECDTLVCLSEMRAHIRTCQKYIDKYGPGSGSGSGRRQTSMTDYFHSTR

SEQ ID NO: 2276 - protein, 208 aa, synthetic construct
  source 1..208: note = HA-3xsvNLS-TCF4.1-(GS)3-RNF125.2-(GS)3-p21.4
MGYPYDVPDYAPKKKRKVQPKKKRKVQPKKKRKVGSGSGSDDLGANDELISFKDEGEQEEKSSENSSAERDLADVKSSLVNESETGSGSGSTSFDCAVCLEVLHQPVRTRCGHVFCRSCIATSLKNNKWTCPYCRAYLPSEGVPATDVAKRMKSEYKNCAECDTLVCLSEMRAHIRTCQKYIDKYGPGSGSGSGRRQTSMTDYYHSTR

SEQ ID NO: 2277 - protein, 208 aa, synthetic construct
  source 1..208: note = HA-3xsvNLS-TCF4.1-(GS)3-RNF125.2-(GS)3-p21.5
MGYPYDVPDYAPKKKRKVQPKKKRKVQPKKKRKVGSGSGSDDLGANDELISFKDEGEQEEKSSENSSAERDLADVKSSLVNESETGSGSGSTSFDCAVCLEVLHQPVRTRCGHVFCRSCIATSLKNNKWTCPYCRAYLPSEGVPATDVAKRMKSEYKNCAECDTLVCLSEMRAHIRTCQKYIDKYGPGSGSGSGRRDSKITDHFHSTR

SEQ ID NO: 2278 - protein, 208 aa, synthetic construct
  source 1..208: note = HA-3xsvNLS-TCF4.1-(GS)3-RNF125.2-(GS)3-p21.6
MGYPYDVPDYAPKKKRKVQPKKKRKVQPKKKRKVGSGSGSDDLGANDELISFKDEGEQEEKSSENSSAERDLADVKSSLVNESETGSGSGSTSFDCAVCLEVLHQPVRTRCGHVFCRSCIATSLKNNKWTCPYCRAYLPSEGVPATDVAKRMKSEYKNCAECDTLVCLSEMRAHIRTCQKYIDKYGPGSGSGSGRRMKSIDTFFHSTR

SEQ ID NO: 2279 - protein, 208 aa, synthetic construct
  source 1..208: note = HA-3xsvNLS-TCF4.1-(GS)3-RNF125.2-(GS)3-p21.7
MGYPYDVPDYAPKKKRKVQPKKKRKVQPKKKRKVGSGSGSDDLGANDELISFKDEGEQEEKSSENSSAERDLADVKSSLVNESETGSGSGSTSFDCAVCLEVLHQPVRTRCGHVFCRSCIATSLKNNKWTCPYCRAYLPSEGVPATDVAKRMKSEYKNCAECDTLVCLSEMRAHIRTCQKYIDKYGPGSGSGSGRRQTRITEYFHSTR

SEQ ID NO: 2280 - protein, 208 aa, synthetic construct
  source 1..208: note = HA-3xsvNLS-TCF4.1-(GS)3-RNF125.2-(GS)3-p21.8
MGYPYDVPDYAPKKKRKVQPKKKRKVQPKKKRKVGSGSGSDDLGANDELISFKDEGEQEEKSSENSSAERDLADVKSSLVNESETGSGSGSTSFDCAVCLEVLHQPVRTRCGHVFCRSCIATSLKNNKWTCPYCRAYLPSEGVPATDVAKRMKSEYKNCAECDTLVCLSEMRAHIRTCQKYIDKYGPGSGSGSGRRQGRLDDFFHSTR

SEQ ID NO: 2281 - protein, 208 aa, synthetic construct
  source 1..208: note = HA-3xsvNLS-TCF4.1-(GS)3-RNF125.2-(GS)3-p21.9
MGYPYDVPDYAPKKKRKVQPKKKRKVQPKKKRKVGSGSGSDDLGANDELISFKDEGEQEEKSSENSSAERDLADVKSSLVNESETGSGSGSTSFDCAVCLEVLHQPVRTRCGHVFCRSCIATSLKNNKWTCPYCRAYLPSEGVPATDVAKRMKSEYKNCAECDTLVCLSEMRAHIRTCQKYIDKYGPGSGSGSGRRDTSMTDFYHSTR

SEQ ID NO: 2282 - protein, 352 aa, synthetic construct
  source 1..352: note = mycNLS-mycV.1500-RNF165.1-(GS)3-mycV.1500
MGPAAKRVKLDGSGSGSEVQLLESGGGLVQPGGSLRLSAAASGFTFADTDMGWFRQAPGKEREGVSAISGSGGSTYYADSVKGRFTISRDNSKNTLYLQMNSLRAEDTAVYYVAIIDDILTGGTFDEGDYWGRGTQVTVSSNTIERFTFPHKYKKRRPQDGKGKKDEGEESDTDEKCTICLSMLEDGEDVRRLPCMHLFHQLCVDQWLAMSKKCPICRVDIEGSGSGSEVQLLESGGGLVQPGGSLRLSAAASGFTFADTDMGWFRQAPGKEREGVSAISGSGGSTYYADSVKGRFTISRDNSKNTLYLQMNSLRAEDTAVYYVAIIDDILTGGTFDEGDYWGRGTQVTVSS

SEQ ID NO: 2283 - protein, 334 aa, synthetic construct
  source 1..334: note = spNLS.2-mycV.1500-(GS)2-RNF4.1-(GS)2-mycV.1500
MGPPRKRLKQSGSGSGSEVQLLESGGGLVQPGGSLRLSAAASGFTFADTDMGWFRQAPGKEREGVSAISGSGGSTYYADSVKGRFTISRDNSKNTLYLQMNSLRAEDTAVYYVAIIDDILTGGTFDEGDYWGRGTQVTVSSGSGSVSCPICMDGYSEIVQNGRLIVSTECGHVFCSQCLRDSLKNANTCPTCRKKINHKRYHPIYIGSGSEVQLLESGGGLVQPGGSLRLSAAASGFTFADTDMGWFRQAPGKEREGVSAISGSGGSTYYADSVKGRFTISRDNSKNTLYLQMNSLRAEDTAVYYVAIIDDILTGGTFDEGDYWGRGTQVTVSS

SEQ ID NO: 2284 - protein, 241 aa, synthetic construct
  source 1..241: note = HA-mycNLS-con1.1-(GS)3-RNF125.2-(GS)3-OMOMYC
MYPYDVPDYAPAAKRVKLDGSGSGSSAVLQKKITDYFHPKKGSGSGSTSFDCAVCLEVLHQPVRTRCGHVFCRSCIATSLKNNKWTCPYCRAYLPSEGVPATDVAKRMKSEYKNCAECDTLVCLSEMRAHIRTCQKYIDKYGPGSGSGSSDTEENVKRRTHNVLERQRRNELKRSFFALRDQIPELENNEKAPKVVILKKATAYILSVQAETQKLISEIDLLRKQNEQLKHKLEQLRNSCA

SEQ ID NO: 2285 - protein, 241 aa, synthetic construct
  source 1..241: note = HA-mycNLS-OMOMYC-(GS)3-RNF125.2-(GS)3-con1.1
MYPYDVPDYAPAAKRVKLDGSGSGSSDTEENVKRRTHNVLERQRRNELKRSFFALRDQIPELENNEKAPKVVILKKATAYILSVQAETQKLISEIDLLRKQNEQLKHKLEQLRNSCAGSGSGSTSFDCAVCLEVLHQPVRTRCGHVFCRSCIATSLKNNKWTCPYCRAYLPSEGVPATDVAKRMKSEYKNCAECDTLVCLSEMRAHIRTCQKYIDKYGPGSGSGSSAVLQKKITDYFHPKK

SEQ ID NO: 2286 - protein, 332 aa, synthetic construct
  source 1..332: note = HA-con1.1-SPOP.2-OMOMYC
MYPYDVPDYAGSGSGSSAVLQKKITDYFHPKKSVNISGQNTMNMVKVPECRLADELGGLWENSRFTDCCLCVAGQEFQAHKAILAARSPVFSAMFEHEMEESKKNRVEINDVEPEVFKEMMCFIYTGKAPNLDKMADDLLAAADKYALERLKVMCEDALCSNLSVENAAEILILADLHSADQLKTQAVDFINYHASDVLETSGWKSMVVSHPHLVAEAYRSLASAQCPFLGPPRKRLKQSSDTEENVKRRTHNVLERQRRNELKRSFFALRDQIPELENNEKAPKVVILKKATAYILSVQAETQKLISEIDLLRKQNEQLKHKLEQLRNSCA

SEQ ID NO: 2287 - protein, 270 aa, synthetic construct; identical to SEQ ID NO: 2200
  source 1..270: note = HA-mycNLS-TCF4.1-(GS)3-RNF125.2-(GS)3-OMOMYC

SEQ ID NO: 2288 - protein, 270 aa, synthetic construct; identical to SEQ ID NO: 2201
  source 1..270: note = HA-mycNLS-OMOMYC-(GS)3-RNF125.2-(GS)3-TCF4.1

SEQ ID NO: 2289 - protein, 194 aa, synthetic construct; identical to SEQ ID NO: 2202
  source 1..194: note = con1-(GS)3-RNF125.2-(GS)3-TCF4.1-mycNLS-HA

SEQ ID NO: 2290 - protein, 194 aa, synthetic construct; identical to SEQ ID NO: 2203
  source 1..194: note = HA-mycNLS-TCF4.1-(GS)3-RNF125.2-(GS)3-con1

SEQ ID NO: 2291 - protein, 285 aa, synthetic construct; identical to SEQ ID NO: 2204
  source 1..285: note = con1-SPOP.2-TCF4.1-HA

SEQ ID NO: 2292 - protein, 285 aa, synthetic construct; identical to SEQ ID NO: 2205
  source 1..285: note = HA-TCF4.1-SPOP.2-con1

SEQ ID NO: 2293 - protein, 133 aa, synthetic construct; identical to SEQ ID NO: 2206
  source 1..133: note = con1-(GS)3-DCAF1-(GS)3-TCF4.1-mycNLS-HA

SEQ ID NO: 2294 - protein, 133 aa, synthetic construct; identical to SEQ ID NO: 2207
  source 1..133: note = HA-mycNLS-TCF4.1-(GS)3-DCAF1-(GS)3-con1

SEQ ID NO: 2295 - protein, 263 aa, synthetic construct; identical to SEQ ID NO: 2189
  source 1..263: note = HA-mycNLS-TCF4.2-(GS)3-RNF125.2-(GS)3-OMOMYC

SEQ ID NO: 2296 - protein, 270 aa, synthetic construct; identical to SEQ ID NO: 2190
  source 1..270: note = HA-mycNLS-TCF4.3-(GS)3-RNF125.2-(GS)3-OMOMYC

SEQ ID NO: 2297 - protein, 263 aa, synthetic construct; identical to SEQ ID NO: 2191
  source 1..263: note = HA-mycNLS-TCF4.4-(GS)3-RNF125.2-(GS)3-OMOMYC

SEQ ID NO: 2298 - protein, 270 aa, synthetic construct; identical to SEQ ID NO: 2192
  source 1..270: note = HA-mycNLS-TCF4.5-(GS)3-RNF125.2-(GS)3-OMOMYC

SEQ ID NO: 2299 - protein, 263 aa, synthetic construct; identical to SEQ ID NO: 2193
  source 1..263: note = HA-mycNLS-TCF4.6-(GS)3-RNF125.2-(GS)3-OMOMYC

SEQ ID NO: 2300 - protein, 270 aa, synthetic construct; identical to SEQ ID NO: 2194
  source 1..270: note = HA-mycNLS-TCF4.7-(GS)3-RNF125.2-(GS)3-OMOMYC

SEQ ID NO: 2301 - protein, 263 aa, synthetic construct; identical to SEQ ID NO: 2195
  source 1..263: note = HA-mycNLS-TCF4.8-(GS)3-RNF125.2-(GS)3-OMOMYC

SEQ ID NO: 2302 - protein, 188 aa, synthetic construct; identical to SEQ ID NO: 2209
  source 1..188: note = HA-mycNLS-TCF4.1-(GS)3-RNF125.2-con1

SEQ ID NO: 2303 - protein, 192 aa, synthetic construct; identical to SEQ ID NO: 2210
  source 1..192: note = HA-mycNLS-TCF4.1-(GS)3-RNF125.2-GGGS-con1

SEQ ID NO: 2304 - protein, 196 aa, synthetic construct; identical to SEQ ID NO: 2211
  source 1..196: note = HA-mycNLS-TCF4.1-(GS)3-RNF125.2-(GGGS)2-con1

SEQ ID NO: 2305 - protein, 200 aa, synthetic construct; identical to SEQ ID NO: 2212
  source 1..200: note = HA-mycNLS-TCF4.1-(GS)3-RNF125.2-(GGGS)3-con1

SEQ ID NO: 2306 - protein, 185 aa, synthetic construct; identical to SEQ ID NO: 2213
  source 1..185: note = HA-TCF4.1-(GS)3-RNF125.2-(GS)3-con1

SEQ ID NO: 2307 - protein, 209 aa, synthetic construct; identical to SEQ ID NO: 2214
  source 1..209: note = HA-mycNLS-TCF4.1-(GS)3-RNF125.2-(GS)3-con1-mycNLS

SEQ ID NO: 2308 - protein, 227 aa, synthetic construct; identical to SEQ ID NO: 2215
  source 1..227: note = HA-mycNLS-TCF4.1-(GS)3-RNF125.2-(GS)3-con1-3xmycNLS

SEQ ID NO: 2309 - protein, 207 aa, synthetic construct; identical to SEQ ID NO: 2216
  source 1..207: note = HA-mycNLS-TCF4.1-(GS)3-RNF125.2-(GS)3-con1-svNLS

SEQ ID NO: 2310 - protein, 223 aa, synthetic construct; identical to SEQ ID NO: 2217
  source 1..223: note = HA-mycNLS-TCF4.1-(GS)3-RNF125.2-(GS)3-con1-3xsvNLS

SEQ ID NO: 2311 - protein, 220 aa, synthetic construct; identical to SEQ ID NO: 2218
  source 1..220: note = HA-mycNLS-TCF4.1-(GS)3-RNF125.2-(GS)3-con1-nlpNLS

SEQ ID NO: 2312 - protein, 221 aa, synthetic construct; identical to SEQ ID NO: 2219
  source 1..221: note = HA-mycNLS-TCF4.1-(GS)3-RNF125.2-(GS)3-con1-bpNLS

SEQ ID NO: 2313 - protein, 227 aa, synthetic construct; identical to SEQ ID NO: 2220
  source 1..227: note = HA-mycNLS-TCF4.1-(GS)3-RNF125.2-(GS)3-con1-hrpNLS

SEQ ID NO: 2314 - protein, 213 aa, synthetic construct; identical to SEQ ID NO: 2221
  source 1..213: note = HA-mycNLS-TCF4.1-(GS)3-RNF125.2-(GS)3-con1-spNLS

SEQ ID NO: 2315 - protein, 285 aa, synthetic construct; identical to SEQ ID NO: 2222
  source 1..285: note = HA-con1-SPOP.3-(GGGS)3GS-TCF4.1

SEQ ID NO: 2316 - protein, 289 aa, synthetic construct; identical to SEQ ID NO: 2223
  source 1..289: note = HA-con1-SPOP.2-GGGS-TCF4.1

SEQ ID NO: 2317 - protein, 293 aa, synthetic construct; identical to SEQ ID NO: 2224
  source 1..293: note = HA-con1-SPOP.2-(GGGS)2-TCF4.1

SEQ ID NO: 2318 - protein, 264 aa, synthetic construct; identical to SEQ ID NO: 2196
  source 1..264: note = HA-mycNLS-TCF4.1-RNF125.2-(GS)3-OMOMYC

SEQ ID NO: 2319 - protein, 268 aa, synthetic construct; identical to SEQ ID NO: 2197
  source 1..268: note = HA-mycNLS-TCF4.1-GGGS-RNF125.2-(GS)3-OMOMYC

SEQ ID NO: 2320 - protein, 272 aa, synthetic construct; identical to SEQ ID NO: 2198
  source 1..272: note = HA-mycNLS-TCF4.1-(GGGS)2-RNF125.2-(GS)3-OMOMYC

SEQ ID NO: 2321 - protein, 276 aa, synthetic construct; identical to SEQ ID NO: 2199
  source 1..276: note = HA-mycNLS-TCF4.1-(GGGS)3-RNF125.2-(GS)3-OMOMYC

SEQ ID NO: 2322 - protein, 188 aa, synthetic construct; identical to SEQ ID NO: 2225
  source 1..188: note = HA-mycNLS-TCF4.1-RNF125.2-(GS)3-con1

SEQ ID NO: 2323 - protein, 192 aa, synthetic construct; identical to SEQ ID NO: 2226
  source 1..192: note = HA-mycNLS-TCF4.1-GGGS-RNF125.2-(GS)3-con1

SEQ ID NO: 2324 - protein, 196 aa, synthetic construct; identical to SEQ ID NO: 2227
  source 1..196: note = HA-mycNLS-TCF4.1-(GGGS)2-RNF125.2-(GS)3-con1

SEQ ID NO: 2325 - protein, 200 aa, synthetic construct; identical to SEQ ID NO: 2228
  source 1..200: note = HA-mycNLS-TCF4.1-(GGGS)3-RNF125.2-(GS)3-con1

SEQ ID NO: 2326 - protein, 187 aa, synthetic construct; identical to SEQ ID NO: 2229
  source 1..187: note = HA-mycNLS-TCF4.2-(GS)3-RNF125.2-(GS)3-con1

SEQ ID NO: 2327 - protein, 194 aa, synthetic construct; identical to SEQ ID NO: 2230
  source 1..194: note = HA-mycNLS-TCF4.3-(GS)3-RNF125.2-(GS)3-con1

SEQ ID NO: 2328 - protein, 187 aa, synthetic construct; identical to SEQ ID NO: 2231
  source 1..187: note = HA-mycNLS-TCF4.4-(GS)3-RNF125.2-(GS)3-con1

SEQ ID NO: 2329 - protein, 194 aa, synthetic construct; identical to SEQ ID NO: 2232
  source 1..194: note = HA-mycNLS-TCF4.5-(GS)3-RNF125.2-(GS)3-con1

SEQ ID NO: 2330 - protein, 187 aa, synthetic construct; identical to SEQ ID NO: 2233
  source 1..187: note = HA-mycNLS-TCF4.6-(GS)3-RNF125.2-(GS)3-con1

SEQ ID NO: 2331 - protein, 194 aa, synthetic construct; identical to SEQ ID NO: 2234
  source 1..194: note = HA-mycNLS-TCF4.7-(GS)3-RNF125.2-(GS)3-con1

SEQ ID NO: 2332 - protein, 187 aa, synthetic construct; identical to SEQ ID NO: 2235
  source 1..187: note = HA-mycNLS-TCF4.8-(GS)3-RNF125.2-(GS)3-con1

SEQ ID NO: 2333 - protein, 241 aa, synthetic construct; identical to SEQ ID NO: 2284
  source 1..241: note = HA-mycNLS-con1-(GS)3-RNF125.2-(GS)3-OMOMYC

SEQ ID NO: 2334 - protein, 241 aa, synthetic construct; identical to SEQ ID NO: 2285
  source 1..241: note = HA-mycNLS-OMOMYC-(GS)3-RNF125.2-(GS)3-con1

SEQ ID NO: 2335 - protein, 332 aa, synthetic construct; identical to SEQ ID NO: 2286
  source 1..332: note = HA-con1-SPOP.2-OMOMYC

SEQ ID NO: 2336 - protein, 208 aa, synthetic construct; identical to SEQ ID NO: 2273
  source 1..208: note = HA-3xsvNLS-TCF4.1-(GS)3-RNF125.2-(GS)3-p21.1

SEQ ID NO: 2337 - protein, 215 aa, synthetic construct; identical to SEQ ID NO: 2274
  source 1..215: note = HA-3xsvNLS-TCF4.1-(GS)3-RNF125.2-(GS)3-p21.2

SEQ ID NO: 2338 - protein, 208 aa, synthetic construct; identical to SEQ ID NO: 2275
  source 1..208: note = HA-3xsvNLS-TCF4.1-(GS)3-RNF125.2-(GS)3-p21.3

SEQ ID NO: 2339 - protein, 208 aa, synthetic construct; identical to SEQ ID NO: 2276
  source 1..208: note = HA-3xsvNLS-TCF4.1-(GS)3-RNF125.2-(GS)3-p21.4

SEQ ID NO: 2340 - protein, 208 aa, synthetic construct; identical to SEQ ID NO: 2277
  source 1..208: note = HA-3xsvNLS-TCF4.1-(GS)3-RNF125.2-(GS)3-p21.5

SEQ ID NO: 2341 - protein, 208 aa, synthetic construct; identical to SEQ ID NO: 2278
  source 1..208: note = HA-3xsvNLS-TCF4.1-(GS)3-RNF125.2-(GS)3-p21.6

SEQ ID NO: 2342 - protein, 208 aa, synthetic construct; identical to SEQ ID NO: 2279
  source 1..208: note = HA-3xsvNLS-TCF4.1-(GS)3-RNF125.2-(GS)3-p21.7

SEQ ID NO: 2343 - protein, 208 aa, synthetic construct; identical to SEQ ID NO: 2280
  source 1..208: note = HA-3xsvNLS-TCF4.1-(GS)3-RNF125.2-(GS)3-p21.8

SEQ ID NO: 2344 - protein, 208 aa, synthetic construct; identical to SEQ ID NO: 2281
  source 1..208: note = HA-3xsvNLS-TCF4.1-(GS)3-RNF125.2-(GS)3-p21.9

SEQ ID NO: 2345 - protein, 221 aa, synthetic construct; identical to SEQ ID NO: 2246
  source 1..221: note = HA-mycNLS-TCF4.2-(GS)3-RNF125.2-(GS)3-con1-hrpNLS

SEQ ID NO: 2346 - protein, 193 aa, synthetic construct
  source 1..193: note = HA-mycNLS-TCF4.1-(GS)6-NHLRC1-(GS)1-con1
MGYPYDVPDYAPAAKRVKLDGSGSGSDDLGANDELISFKDEGEQEEKSSENSSAERDLADVKSSLVNESETGSGSGSGSGSGSESGPALHELMREAEISLLECKVCFEKFGHRQQRRPRNLSCGHVVCLACVAALAHPRTLALECPFCRRACRGCDTSDCLPVLHLIELLGSALRGSSAVLQKKITDYFHPKK

SEQ ID NO: 2347 - protein, 203 aa, synthetic construct
  source 1..203: note = HA-mycNLS-TCF4.1-(GS)6-NHLRC1-(GS)6-con1
MGYPYDVPDYAPAAKRVKLDGSGSGSDDLGANDELISFKDEGEQEEKSSENSSAERDLADVKSSLVNESETGSGSGSGSGSGSESGPALHELMREAEISLLECKVCFEKFGHRQQRRPRNLSCGHVVCLACVAALAHPRTLALECPFCRRACRGCDTSDCLPVLHLIELLGSALRGSGSGSGSGSGSSAVLQKKITDYFHPKK

SEQ ID NO: 2348 - protein, 186 aa, synthetic construct
  source 1..186: note = HA-mycNLS-TCF4.2-(GS)6-NHLRC1-(GS)1-con1
MGYPYDVPDYAPAAKRVKLDGSGSGSDDLGANDELISFKDEGEQEEAERDLADVKSSLVNESETGSGSGSGSGSGSESGPALHELMREAEISLLECKVCFEKFGHRQQRRPRNLSCGHVVCLACVAALAHPRTLALECPFCRRACRGCDTSDCLPVLHLIELLGSALRGSSAVLQKKITDYFHPKK

SEQ ID NO: 2349 - protein, 196 aa, synthetic construct
  source 1..196: note = HA-mycNLS-TCF4.2-(GS)6-NHLRC1-(GS)6-con1
MGYPYDVPDYAPAAKRVKLDGSGSGSDDLGANDELISFKDEGEQEEAERDLADVKSSLVNESETGSGSGSGSGSGSESGPALHELMREAEISLLECKVCFEKFGHRQQRRPRNLSCGHVVCLACVAALAHPRTLALECPFCRRACRGCDTSDCLPVLHLIELLGSALRGSGSGSGSGSGSSAVLQKKITDYFHPKK

SEQ ID NO: 2350 - protein, 193 aa, synthetic construct; identical to SEQ ID NO: 2238
  source 1..193: note = HA-mycNLS-con1-(GS)1-NHLRC1-(GS)6-TCF4.1

SEQ ID NO: 2351 - protein, 203 aa, synthetic construct; identical to SEQ ID NO: 2239
  source 1..203: note = HA-mycNLS-con1-(GS)6-NHLRC1-(GS)6-TCF4.1

SEQ ID NO: 2352 - protein, 159 aa, synthetic construct
  source 1..159: note = HA-TCF4.2-(GS)6-NHLRC1.1
MGYPYDVPDYAGSGSGSDDLGANDELISFKDEGEQEEAERDLADVKSSLVNESETGSGSGSGSGSGSESGPALHELMREAEISLLECKVCFEKFGHRQQRRPRNLSCGHVVCLACVAALAHPRTLALECPFCRRACRGCDTSDCLPVLHLIELLGSALR

SEQ ID NO: 2353 - protein, 158 aa, synthetic construct
  source 1..158: note = HA-mycNLS-TCF4.2-(GS)1-NHLRC1.1
MGYPYDVPDYAPAAKRVKLDGSGSGSDDLGANDELISFKDEGEQEEAERDLADVKSSLVNESETGSESGPALHELMREAEISLLECKVCFEKFGHRQQRRPRNLSCGHVVCLACVAALAHPRTLALECPFCRRACRGCDTSDCLPVLHLIELLGSALR

SEQ ID NO: 2354 - protein, 178 aa, synthetic construct
  source 1..178: note = HA-mycNLS-TCF4.2-(GS)6-NHLRC1.1-spNLS.2
MGYPYDVPDYAPAAKRVKLDGSGSGSDDLGANDELISFKDEGEQEEAERDLADVKSSLVNESETGSGSGSGSGSGSESGPALHELMREAEISLLECKVCFEKFGHRQQRRPRNLSCGHVVCLACVAALAHPRTLALECPFCRRACRGCDTSDCLPVLHLIELLGSALRGPPRKRLKQS

SEQ ID NO: 2355 - protein, 130 aa, synthetic construct; identical to SEQ ID NO: 57
  source 1..130: note = HA-VL12.3

SEQ ID NO: 2356 - protein, 497 aa, synthetic construct; identical to SEQ ID NO: 452
  source 1..497: note = HA-FBXW7a.1-(GS)3-VL12.3

SEQ ID NO: 2357 - protein, 417 aa, synthetic construct; identical to SEQ ID NO: 536
  source 1..417: note = HA-FBXW7b.1-(GS)3-VL12.3

SEQ ID NO: 2358 - protein, 139 aa, synthetic construct; identical to SEQ ID NO: 56
  source 1..139: note = HA-mycNLS-VL12.3

SEQ ID NO: 2359 - protein, 371 aa, synthetic construct; identical to SEQ ID NO: 488
  source 1..371: note = VL12.3-(GS)3-SPOP.1-mycNLS-HA

SEQ ID NO: 2360 - protein, 185 aa, synthetic construct
  source 1..185: note = VL12.3-(GS)3-VIF.1-mycNLS-HA
MGSQPVLTQSPSVSAAPRQRVTISVSGSNSNIGSNTVNWIQQLPGRAPELLMYDDDLLAPGVSDRFSGSRSGTSASLTISGLQSEDEADYYAATWDDSLNGWVFGGGTKVTVLSGGSGSGSSESAIRNTILGRIVSPRCEYQAGHNKVGSLQYLALAALIKPKGSGSPAAKRVKLDYPYDVPDYA

SEQ ID NO: 2361 - protein, 310 aa, synthetic construct; identical to SEQ ID NO: 500
  source 1..310: note = VL12.3-(GS)3-CHIP.1-HA

SEQ ID NO: 2362 - protein, 268 aa, synthetic construct
  source 1..268: note = HA-3xsvNLS-RNF125.2-(GGGS)2-mycV.1500
MGYPYDVPDYAPKKKRKVQPKKKRKVQPKKKRKVGSGSGSTSFDCAVCLEVLHQPVRTRCGHVFCRSCIATSLKNNKWTCPYCRAYLPSEGVPATDVAKRMKSEYKNCAECDTLVCLSEMRAHIRTCQKYIDKYGPGGGSGGGSEVQLLESGGGLVQPGGSLRLSAAASGFTFADTDMGWFRQAPGKEREGVSAISGSGGSTYYADSVKGRFTISRDNSKNTLYLQMNSLRAEDTAVYYVAIIDDILTGGTFDEGDYWGRGTQVTVSS

SEQ ID NO: 2363 - protein, 261 aa, synthetic construct
  source 1..261: note = HA-nlpNLS-RNF125.2-(GGGS)1-mycV.1500
MGYPYDVPDYAAVKRPAATKKAGQAKKKKLDGSGSGSTSFDCAVCLEVLHQPVRTRCGHVFCRSCIATSLKNNKWTCPYCRAYLPSEGVPATDVAKRMKSEYKNCAECDTLVCLSEMRAHIRTCQKYIDKYGPGGGSEVQLLESGGGLVQPGGSLRLSAAASGFTFADTDMGWFRQAPGKEREGVSAISGSGGSTYYADSVKGRFTISRDNSKNTLYLQMNSLRAEDTAVYYVAIIDDILTGGTFDEGDYWGRGTQVTVSS

SEQ ID NO: 2364 - protein, 250 aa, synthetic construct
  source 1..250: note = HA-mycNLS-RNF125.2-GGGS-mycV.1500
MGYPYDVPDYAPAAKRVKLDGGGSGSTSFDCAVCLEVLHQPVRTRCGHVFCRSCIATSLKNNKWTCPYCRAYLPSEGVPATDVAKRMKSEYKNCAECDTLVCLSEMRAHIRTCQKYIDKYGPGGGSEVQLLESGGGLVQPGGSLRLSAAASGFTFADTDMGWFRQAPGKEREGVSAISGSGGSTYYADSVKGRFTISRDNSKNTLYLQMNSLRAEDTAVYYVAIIDDILTGGTFDEGDYWGRGTQVTVSS

SEQ ID NO: 2365 - protein, 261 aa, synthetic construct
  source 1..261: note = HA-nlpNLS-RNF125.2-GGGS-mycV.1500
MGYPYDVPDYAAVKRPAATKKAGQAKKKKLDGGGSGSTSFDCAVCLEVLHQPVRTRCGHVFCRSCIATSLKNNKWTCPYCRAYLPSEGVPATDVAKRMKSEYKNCAECDTLVCLSEMRAHIRTCQKYIDKYGPGGGSEVQLLESGGGLVQPGGSLRLSAAASGFTFADTDMGWFRQAPGKEREGVSAISGSGGSTYYADSVKGRFTISRDNSKNTLYLQMNSLRAEDTAVYYVAIIDDILTGGTFDEGDYWGRGTQVTVSS

SEQ ID NO: 2366 - protein, 268 aa, synthetic construct
  source 1..268: note = HA-hrpNLS-RNF125.2-GGGS-mycV.1500
MGYPYDVPDYARSGGNHRRNGRGGRGGYNRRNNGYHPYGGGSGSTSFDCAVCLEVLHQPVRTRCGHVFCRSCIATSLKNNKWTCPYCRAYLPSEGVPATDVAKRMKSEYKNCAECDTLVCLSEMRAHIRTCQKYIDKYGPGGGSEVQLLESGGGLVQPGGSLRLSAAASGFTFADTDMGWFRQAPGKEREGVSAISGSGGSTYYADSVKGRFTISRDNSKNTLYLQMNSLRAEDTAVYYVAIIDDILTGGTFDEGDYWGRGTQVTVSS

SEQ ID NO: 2367 - protein, 246 aa, synthetic construct
  source 1..246: note = HA-mycNLS-mycV.1500-GGGS-NHLRC1.1
MGYPYDVPDYAPAAKRVKLDGGGSGSEVQLLESGGGLVQPGGSLRLSAAASGFTFADTDMGWFRQAPGKEREGVSAISGSGGSTYYADSVKGRFTISRDNSKNTLYLQMNSLRAEDTAVYYVAIIDDILTGGTFDEGDYWGRGTQVTVSSGGGSESGPALHELMREAEISLLECKVCFEKFGHRQQRRPRNLSCGHVVCLACVAALAHPRTLALECPFCRRACRGCDTSDCLPVLHLIELLGSALR

SEQ ID NO: 2368 - protein, 226 aa, synthetic construct
  source 1..226: note = HA-nlpNLS-mycV.1500-GGGS-RNF4.1
MGYPYDVPDYAAVKRPAATKKAGQAKKKKLDGGGSGSEVQLLESGGGLVQPGGSLRLSAAASGFTFADTDMGWFRQAPGKEREGVSAISGSGGSTYYADSVKGRFTISRDNSKNTLYLQMNSLRAEDTAVYYVAIIDDILTGGTFDEGDYWGRGTQVTVSSGGGSVSCPICMDGYSEIVQNGRLIVSTECGHVFCSQCLRDSLKNANTCPTCRKKINHKRYHPIYI

SEQ ID NO: 2369 - protein, 243 aa, synthetic construct
  source 1..243: note = HA-nlpNLS-mycV.1500-GGGS-RNF12.2
MGYPYDVPDYAAVKRPAATKKAGQAKKKKLDGGGSGSEVQLLESGGGLVQPGGSLRLSAAASGFTFADTDMGWFRQAPGKEREGVSAISGSGGSTYYADSVKGRFTISRDNSKNTLYLQMNSLRAEDTAVYYVAIIDDILTGGTFDEGDYWGRGTQVTVSSGGGSGLTKEQIDNLAMRSFGENDALKTCSVCITEYTEGNKLRKLPCSHEYHVHCIDRWLSENSTCPICRRAVLASGNRESVV

SEQ ID NO: 2370 - protein, 222 aa, synthetic construct
  source 1..222: note = HA-nlpNLS-mycV.1500-d-RNF4.1
MGYPYDVPDYAAVKRPAATKKAGQAKKKKLDGGGSGSEVQLLESGGGLVQPGGSLRLSAAASGFTFADTDMGWFRQAPGKEREGVSAISGSGGSTYYADSVKGRFTISRDNSKNTLYLQMNSLRAEDTAVYYVAIIDDILTGGTFDEGDYWGRGTQVTVSSVSCPICMDGYSEIVQNGRLIVSTECGHVFCSQCLRDSLKNANTCPTCRKKINHKRYHPIYI

SEQ ID NO: 2371 - protein, 239 aa, synthetic construct
  source 1..239: note = HA-nlpNLS-mycV.1500-d-RNF12.2
MGYPYDVPDYAAVKRPAATKKAGQAKKKKLDGGGSGSEVQLLESGGGLVQPGGSLRLSAAASGFTFADTDMGWFRQAPGKEREGVSAISGSGGSTYYADSVKGRFTISRDNSKNTLYLQMNSLRAEDTAVYYVAIIDDILTGGTFDEGDYWGRGTQVTVSSGLTKEQIDNLAMRSFGENDALKTCSVCITEYTEGNKLRKLPCSHEYHVHCIDRWLSENSTCPICRRAVLASGNRESVV

SEQ ID NO: 2372 - protein, 253 aa, synthetic construct
  source 1..253: note = HA-nlpNLS-mycV.1500-d-NHLRC1.1
MGYPYDVPDYAAVKRPAATKKAGQAKKKKLDGGGSGSEVQLLESGGGLVQPGGSLRLSAAASGFTFADTDMGWFRQAPGKEREGVSAISGSGGSTYYADSVKGRFTISRDNSKNTLYLQMNSLRAEDTAVYYVAIIDDILTGGTFDEGDYWGRGTQVTVSSESGPALHELMREAEISLLECKVCFEKFGHRQQRRPRNLSCGHVVCLACVAALAHPRTLALECPFCRRACRGCDTSDCLPVLHLIELLGSALR

SEQ ID NO: 2373 - protein, 216 aa, synthetic construct
  source 1..216: note = HA-spNLS.2-mycV.1500-GGGS-RNF4.1
MGYPYDVPDYAGPPRKRLKQSGGGSGSEVQLLESGGGLVQPGGSLRLSAAASGFTFADTDMGWFRQAPGKEREGVSAISGSGGSTYYADSVKGRFTISRDNSKNTLYLQMNSLRAEDTAVYYVAIIDDILTGGTFDEGDYWGRGTQVTVSSGGGSVSCPICMDGYSEIVQNGRLIVSTECGHVFCSQCLRDSLKNANTCPTCRKKINHKRYHPIYI

SEQ ID NO: 2374 - protein, 251 aa, synthetic construct
  source 1..251: note = HA-spNLS.2-RNF125.2-(GGGS)1-mycV.1500
MGYPYDVPDYAGPPRKRLKQSGGGSGSTSFDCAVCLEVLHQPVRTRCGHVFCRSCIATSLKNNKWTCPYCRAYLPSEGVPATDVAKRMKSEYKNCAECDTLVCLSEMRAHIRTCQKYIDKYGPGGGSEVQLLESGGGLVQPGGSLRLSAAASGFTFADTDMGWFRQAPGKEREGVSAISGSGGSTYYADSVKGRFTISRDNSKNTLYLQMNSLRAEDTAVYYVAIIDDILTGGTFDEGDYWGRGTQVTVSS

SEQ ID NO: 2375 - protein, 254 aa, synthetic construct
  source 1..254: note = HA-RNF125.2-(GGGS)1-mycV.1500-mycNLS
MGYPYDVPDYAGGGSGSTSFDCAVCLEVLHQPVRTRCGHVFCRSCIATSLKNNKWTCPYCRAYLPSEGVPATDVAKRMKSEYKNCAECDTLVCLSEMRAHIRTCQKYIDKYGPGGGSEVQLLESGGGLVQPGGSLRLSAAASGFTFADTDMGWFRQAPGKEREGVSAISGSGGSTYYADSVKGRFTISRDNSKNTLYLQMNSLRAEDTAVYYVAIIDDILTGGTFDEGDYWGRGTQVTVSSGGGSPAAKRVKLD

SEQ ID NO: 2376 - protein, 265 aa, synthetic construct
  source 1..265: note = HA-RNF125.2-(GGGS)1-mycV.1500-nlpNLS
MGYPYDVPDYAGGGSGSTSFDCAVCLEVLHQPVRTRCGHVFCRSCIATSLKNNKWTCPYCRAYLPSEGVPATDVAKRMKSEYKNCAECDTLVCLSEMRAHIRTCQKYIDKYGPGGGSEVQLLESGGGLVQPGGSLRLSAAASGFTFADTDMGWFRQAPGKEREGVSAISGSGGSTYYADSVKGRFTISRDNSKNTLYLQMNSLRAEDTAVYYVAIIDDILTGGTFDEGDYWGRGTQVTVSSGGGSAVKRPAATKKAGQAKKKKLD

SEQ ID NO: 2377 - protein, 272 aa, synthetic construct
  source 1..272: note = HA-RNF125.2-(GGGS)1-mycV.1500-hrpNLS
MGYPYDVPDYAGGGSGSTSFDCAVCLEVLHQPVRTRCGHVFCRSCIATSLKNNKWTCPYCRAYLPSEGVPATDVAKRMKSEYKNCAECDTLVCLSEMRAHIRTCQKYIDKYGPGGGSEVQLLESGGGLVQPGGSLRLSAAASGFTFADTDMGWFRQAPGKEREGVSAISGSGGSTYYADSVKGRFTISRDNSKNTLYLQMNSLRAEDTAVYYVAIIDDILTGGTFDEGDYWGRGTQVTVSSGGGSRSGGNHRRNGRGGRGGYNRRNNGYHPY

SEQ ID NO: 2378 - protein, 255 aa, synthetic construct
  source 1..255: note = HA-RNF125.2-(GGGS)1-mycV.1500-spNLS.2
MGYPYDVPDYAGGGSGSTSFDCAVCLEVLHQPVRTRCGHVFCRSCIATSLKNNKWTCPYCRAYLPSEGVPATDVAKRMKSEYKNCAECDTLVCLSEMRAHIRTCQKYIDKYGPGGGSEVQLLESGGGLVQPGGSLRLSAAASGFTFADTDMGWFRQAPGKEREGVSAISGSGGSTYYADSVKGRFTISRDNSKNTLYLQMNSLRAEDTAVYYVAIIDDILTGGTFDEGDYWGRGTQVTVSSGGGSGPPRKRLKQS

SEQ ID NO: 2379 - protein, 240 aa, synthetic construct
  source 1..240: note = HA-mycNLS-mycV.1500-GGGS-ZNRF1.1
MGYPYDVPDYAPAAKRVKLDGGGSGSEVQLLESGGGLVQPGGSLRLSAAASGFTFADTDMGWFRQAPGKEREGVSAISGSGGSTYYADSVKGRFTISRDNSKNTLYLQMNSLRAEDTAVYYVAIIDDILTGGTFDEGDYWGRGTQVTVSSGGGSGFKCPICSKSVASDEMEMHFIMCLSKPRLSYNDDVLTKDAGECVICLEELLQGDTIARLPCLCIYHKSCIDSWFEVNRSCPEHPAD

SEQ ID NO: 2380 - protein, 251 aa, synthetic construct
  source 1..251: note = HA-nlpNLS-mycV.1500-GGGS-ZNRF1.1
MGYPYDVPDYAAVKRPAATKKAGQAKKKKLDGGGSGSEVQLLESGGGLVQPGGSLRLSAAASGFTFADTDMGWFRQAPGKEREGVSAISGSGGSTYYADSVKGRFTISRDNSKNTLYLQMNSLRAEDTAVYYVAIIDDILTGGTFDEGDYWGRGTQVTVSSGGGSGFKCPICSKSVASDEMEMHFIMCLSKPRLSYNDDVLTKDAGECVICLEELLQGDTIARLPCLCIYHKSCIDSWFEVNRSCPEHPAD

SEQ ID NO: 2381 - protein, 226 aa, synthetic construct; identical to SEQ ID NO: 2171
  source 1..226: note = HA-con1.1-SPOP.3

SEQ ID NO: 2382 - protein, 241 aa, synthetic construct
  source 1..241: note = HA-con1.1-SPOP.3-mycNLS
MYPYDVPDYAGSGSGSSAVLQKKITDYFHPKKSVNISGQNTMNMVKVPECRLADELGGLWENSRFTDCCLCVAGQEFQAHKAILAARSPVFSAMFEHEMEESKKNRVEINDVEPEVFKEMMCFIYTGKAPNLDKMADDLLAAADKYALERLKVMCEDALCSNLSVENAAEILILADLHSADQLKTQAVDFINYHASDVLETSGWKSMVVSHPHLVAEAYRSLASAQGGGSGSPAAKRVKLD

SEQ ID NO: 2383 - protein, 259 aa, synthetic construct
  source 1..259: note = HA-con1.1-SPOP.3-3xmycNLS
MYPYDVPDYAGSGSGSSAVLQKKITDYFHPKKSVNISGQNTMNMVKVPECRLADELGGLWENSRFTDCCLCVAGQEFQAHKAILAARSPVFSAMFEHEMEESKKNRVEINDVEPEVFKEMMCFIYTGKAPNLDKMADDLLAAADKYALERLKVMCEDALCSNLSVENAAEILILADLHSADQLKTQAVDFINYHASDVLETSGWKSMVVSHPHLVAEAYRSLASAQGGGSGSPAAKRVKLDPAAKRVKLDPAAKRVKLD

SEQ ID NO: 2384 - protein, 239 aa, synthetic construct
  source 1..239: note = HA-con1.1-SPOP.3-svNLS
MYPYDVPDYAGSGSGSSAVLQKKITDYFHPKKSVNISGQNTMNMVKVPECRLADELGGLWENSRFTDCCLCVAGQEFQAHKAILAARSPVFSAMFEHEMEESKKNRVEINDVEPEVFKEMMCFIYTGKAPNLDKMADDLLAAADKYALERLKVMCEDALCSNLSVENAAEILILADLHSADQLKTQAVDFINYHASDVLETSGWKSMVVSHPHLVAEAYRSLASAQGGGSGSPKKKRKV

SEQ ID NO: 2385 - protein, 255 aa, synthetic construct
  source 1..255: note = HA-con1.1-SPOP.3-3xsvNLS
MYPYDVPDYAGSGSGSSAVLQKKITDYFHPKKSVNISGQNTMNMVKVPECRLADELGGLWENSRFTDCCLCVAGQEFQAHKAILAARSPVFSAMFEHEMEESKKNRVEINDVEPEVFKEMMCFIYTGKAPNLDKMADDLLAAADKYALERLKVMCEDALCSNLSVENAAEILILADLHSADQLKTQAVDFINYHASDVLETSGWKSMVVSHPHLVAEAYRSLASAQGGGSGSPKKKRKVQPKKKRKVQPKKKRKV

SEQ ID NO: 2386 - protein, 252 aa, synthetic construct
  source 1..252: note = HA-con1.1-SPOP.3-nlpNLS
MYPYDVPDYAGSGSGSSAVLQKKITDYFHPKKSVNISGQNTMNMVKVPECRLADELGGLWENSRFTDCCLCVAGQEFQAHKAILAARSPVFSAMFEHEMEESKKNRVEINDVEPEVFKEMMCFIYTGKAPNLDKMADDLLAAADKYALERLKVMCEDALCSNLSVENAAEILILADLHSADQLKTQAVDFINYHASDVLETSGWKSMVVSHPHLVAEAYRSLASAQGGGSGSAVKRPAATKKAGQAKKKKLD

SEQ ID NO: 2387 - protein, 253 aa, synthetic construct
  source 1..253: note = HA-con1.1-SPOP.3-bpNLS
MYPYDVPDYAGSGSGSSAVLQKKITDYFHPKKSVNISGQNTMNMVKVPECRLADELGGLWENSRFTDCCLCVAGQEFQAHKAILAARSPVFSAMFEHEMEESKKNRVEINDVEPEVFKEMMCFIYTGKAPNLDKMADDLLAAADKYALERLKVMCEDALCSNLSVENAAEILILADLHSADQLKTQAVDFINYHASDVLETSGWKSMVVSHPHLVAEAYRSLASAQGGGSGSGKRKLITSEEERSPAKRGRKS

SEQ ID NO: 2388 - protein, 259 aa, synthetic construct
  source 1..259: note = HA-con1.1-SPOP.3-hrpNLS
MYPYDVPDYAGSGSGSSAVLQKKITDYFHPKKSVNISGQNTMNMVKVPECRLADELGGLWENSRFTDCCLCVAGQEFQAHKAILAARSPVFSAMFEHEMEESKKNRVEINDVEPEVFKEMMCFIYTGKAPNLDKMADDLLAAADKYALERLKVMCEDALCSNLSVENAAEILILADLHSADQLKTQAVDFINYHASDVLETSGWKSMVVSHPHLVAEAYRSLASAQGGGSGSRSGGNHRRNGRGGRGGYNRRNNGYHPY